(19) United States
(12) Patent Application Publication
(10) Pub. No.: US 2023/0114825 A1
(43) Pub. Date: Apr. 13, 2023

(54) De novo designed protein homodimers containing tunable symmetric pockets

(71) Applicant: University of Washington, Seattle, WA (US)

(72) Inventors: David Baker, Seattle, WA (US); Derrick Hicks, Seattle, WA (US)

(21) Appl. No.: 17/938,752

(22) Filed: Oct. 7, 2022

Related U.S. Application Data
(60) Provisional application No. 63/255,355, filed on Oct. 13, 2021.

(51) Int. Cl. C07K 14/47; C12N 15/63

(52) U.S. Cl. CPC C07K 14/47; C12N 15/63; A61K 38/00

(57) ABSTRACT

Polypeptides including an amino acid sequence at least 50% identical to the amino acid sequence selected from the group consisting of SEQ ID NOS: 1-3297 are provided, which are capable of forming protein homodimers containing tunable symmetric pockets.

### CROSS REFERENCE

[0001] This application claims priority to U.S. Provisional Application Ser. No. 63/255,355 filed Oct. 13, 2021, incorporated by reference herein in its entirety.

### FEDERAL FUNDING STATEMENT

[0002] This invention was made with government support under Grant Nos. R01 AG063 845 and U19 AG065156, awarded by the National Institutes of Health. The government has certain rights in the invention.

### SEQUENCE LISTING STATEMENT

[0003] A computer readable form of the Sequence Listing is filed with this application by electronic submission and is incorporated into this application by reference in its entirety. The Sequence Listing is contained in the file created on Aug. 31, 2022 having the file name “21-1198-US.xml” and is 4,748 kb in size.

### BACKGROUND

[0004] Cyclic two fold (C2) symmetric molecules are common in biology and medicine, such as HIV protease inhibitors (Erickson and Kempf 1994), iron sulfur clusters (Bandyopadhyay, Chandramouli, and Johnson 2008), and the chlorophyll special pair found in photosynthetic reaction centers (Oie, Maggiora, and Christoffersen 2009). To bind such compounds, C2 symmetric protein homodimers are advantageous because each protein monomer can make identical interactions with an asymmetric unit of the small molecule. A large set of protein scaffolds with C2 symmetric binding pockets spanning a wide range of sizes and shapes that can be functionalized without compromising stability could provide new enzymes, therapeutics, and light harvesting proteins, but neither such sets nor methods to generate them currently exist.

### SUMMARY

[0005] In one aspect, the disclosure provides polypeptides comprising an amino acid sequence at least 50%, 55%, 60%, 65%, 70%, 75%, 80%, 85%, 90%, 91%, 92%, 93%, 94%, 95%, 96%, 97%, 98%, 99%, or 100% identical to the amino acid sequence selected from the group consisting of SEQ ID NOS:1-3297, not including any functional domains added fused to the polypeptides (whether N-terminal, C-terminal, or internal), and wherein the 1, 2, 3, 4, or 5 N-terminal and/or C-terminal amino acid residues may be present or absent and when absent are not considered in determining the percent identity. In one embodiment, all residues are included when determining the percent identity relative to the reference polypeptide. In another embodiment, amino acid substitutions relative to the reference polypeptide are conservative amino acid substitutions. In a further embodiment, the polypeptide further comprises one or more functional domains.

[0006] In one embodiment, the disclosure provides homodimers of a polypeptide of the disclosure. In one embodiment, the homodimer comprises a ligand bound in a pocket of the homodimer. In another embodiment, the ligand comprises a C2 symmetric compound.

[0007] In one embodiment, the disclosure provides compositions comprising 2, 5, 10, 15, 25, 50, 100, 250, 500, 750, 1000, 1250, 1500, 1750, 2000, 2250, 2500, 2750, or more different polypeptides or homodimers of any embodiment of the disclosure.

[0008] The disclosure also provides nucleic acids encoding polypeptides of the disclosure, expression vector comprising the nucleic acids operatively linked to a suitable control sequence, host cells comprising a polypeptide, homodimer, nucleic acid, and/or expression vector of the disclosure, pharmaceutical compositions comprising a polypeptide, homodimer, nucleic acid, expression vector, and/or host cell of the disclosure together with a pharmaceutically acceptable carrier, and methods for using a polypeptide, homodimer, nucleic acid, expression vector, host cell, and/or pharmaceutical composition of the disclosure.

### DESCRIPTION OF THE FIGURES

[0009] FIG. 1. Design strategy. A. Schematic of our design pipeline from curved repeat protein (left) to symmetric homodimers (center) to future C2 symmetric ligand binders (right). Hypothetical C2 symmetric ligands are shown. B. Example of repeat proteins sampling different curvature. Proteins with desired helical parameters are shown in boxes. The helical symmetry axis of the proteins are aligned to the z-axis, and an xyz axis is depicted to show that we are looking directly down the z-axis. C. A histogram of helical curvature for 1 million backbones made with or without our biased sampling method. D. A single monomer (left) can be docked into various rigid body orientations to create homodimers (right) with diverse central cavities. This docking approach can create head to tail (light box) or head to head +tail to tail (dark box) homodimers. E. Examples of homodimers featuring a range of cavity sizes and shapes. Each dimer is based on a different monomeric curved repeat protein. The top row shows proteins looking down the central cavity, depicted as backbone ribbon representation for both chains and with surface mesh on chain B. The bottom row shows a side view slicing through the protein to illustrate the shape of the central cavity, depicted as surface representation. Head to tail homodimers are shown in a light gray box and head to head+tail to tail homodimers are shown in a dark gray box. The C2 symmetry axis of the protein homodimer is indicated.

[0010] FIG. 2. Biophysical characterization. Representative data for 6 successful designs and 1 failed design as assessed by SAXS. Left: Design names along with the helical parameters (rise, radius, and curvature) of the associated protein monomer. Second column; design models depicted as ribbon backbones. Third column; normalized UV absorbance (A280) obtained during SEC-MALS, followed by circular dichroism scans from 200-260 nm at 25° C., 95° C. and 25° C. post heating. Fourth column; predicted SAXS profiles overlaid on experimental SAXS data points for scattering vector (q, from 0 to 0.25) vs intensity (I).

[0011] FIG. 3. Schematic of a repeat protein with corresponding repeat helical axis. On top a repeat unit is shown along with a black dot representing the repeat unit center of mass. Below, the center of mass of four repeat units are plotted along their central helical axis. The helical parameters, rise, radius, and curvature, which we used to supplement the coarse grained scoring function are shown.

[0012] FIG. 4. Example repeat proteins sampling different helical rise. A protein with desired helical parameters is shown in the middle. The helical axis of all proteins are aligned to the z-axis, and the corresponding xyz coordinate frame is shown.

[0013] FIG. 5. Scatter plot of the number of designs having desired helical parameters with biased sampling or without biased sampling according to the length of helix 1 and helix 2. The size of each circle is proportional to the number of designs with desired parameters (left) plus being well packed (right). 1 million trajectories were attempted with biased sampling and without biased sampling. Sampling was spread out equally across all helix 1 by helix 2 combinations.

[0014] FIG. 6. Three-dimensional landscape of repeat protein space for rise, radius, and curvature. 1 million trajectories for repeat proteins generated using biased sampling (left) or unbiased sampling (right) plotted on a three-dimensional grid for rise, radius, and curvature. Two proteins are shown from each of the biased and unbiased trajectories along with their helical parameters. The two proteins on the left represent the type of curved repeat proteins we aimed to generate.

[0015] FIG. 7. Histogram of SS Degree Worst, which measures the minimum number of neighboring helices that each central helix in a repeat protein contacts. Data for models produced without our biased fragment assembly protocol are shown as are data for models produced with our biased fragment assembly protocol.

[0016] FIG. 8. Design workflow showing the number of designs at each step along with filtering methods used to pick the best designs for subsequent steps.

[0017] FIG. 9. Designs span a diverse range of sizes and shapes. Shown are 72 ordered designs depicted as ribbon backbones.

[0018] FIG. 10. The right side shows boxplots plus points for four pocket features, volume, dimension 1, dimension 2, and dimension 3 for the top one thousand designs along with all ordered scaffold designs. The pocket features were calculated on poly-alanine backbones to represent the maximum possible size of the pockets.

[0019] FIG. 11. Head-to-tail homodimers (left) compared to head-to-head+tail-to-tail homodimers (right). The top shows the proteins looking down the axis of symmetry, and below, the proteins are rotated 180° to show the side of the protein. Proteins are shown in backbone cartoon representation.

### DETAILED DESCRIPTION

[0020] All references cited are herein incorporated by reference in their entirety. Within this application, unless otherwise stated, the techniques utilized may be found in any of several well-known references such as: Molecular Cloning: A Laboratory Manual (Sambrook, et al., 1989, Cold Spring Harbor Laboratory Press), Gene Expression Technology (Methods in Enzymology, Vol. 185, edited by D. Goeddel, 1991. Academic Press, San Diego, Calif.), “Guide to Protein Purification” in Methods in Enzymology (M. P. Deutshcer, ed., (1990) Academic Press, Inc.); PCR Protocols: A Guide to Methods and Applications (Innis, et al. 1990. Academic Press, San Diego, Calif.), Culture of Animal Cells: A Manual of Basic Technique, 2nd Ed. (R. I. Freshney. 1987. Liss, Inc. New York, N.Y.), Gene Transfer and Expression Protocols, pp. 109-128, ed. E. J. Murray, The Humana Press Inc., Clifton, N.J.), and the Ambion 1998 Catalog (Ambion, Austin, Tex.).

[0021] As used herein, the singular forms “a”, “an” and “the” include plural referents unless the context clearly dictates otherwise.

[0022] As used herein, the amino acid residues are abbreviated as follows: alanine (Ala; A), asparagine (Asn; N), aspartic acid (Asp; D), arginine (Arg; R), cysteine (Cys; C), glutamic acid (Glu; E), glutamine (Gln; Q), glycine (Gly; G), histidine (His; H), isoleucine (Ile; I), leucine (Leu; L), lysine (Lys; K), methionine (Met; M), phenylalanine (Phe; F), proline (Pro; P), serine (Ser; S), threonine (Thr; T), tryptophan (Trp; W), tyrosine (Tyr; Y), and valine (Val; V).

[0023] In all embodiments of polypeptides disclosed herein, any N-terminal methionine residues are optional (i.e.: the N-terminal methionine residue may be present or may be absent).

[0024] All embodiments of any aspect of the disclosure can be used in combination, unless the context clearly dictates otherwise.

[0025] Unless the context clearly requires otherwise, throughout the description and the claims, the words ‘comprise’, ‘comprising’, and the like are to be construed in an inclusive sense as opposed to an exclusive or exhaustive sense; that is to say, in the sense of “including, but not limited to”. Words using the singular or plural number also include the plural and singular number, respectively. Additionally, the words “herein,” “above,” and “below” and words of similar import, when used in this application, shall refer to this application as a whole and not to any particular portions of the application.

[0026] In a first aspect, the disclosure provides polypeptides comprising an amino acid sequence at least 50%, 55%, 60%, 65%, 70%, 75%, 80%, 85%, 90%, 91%, 92%, 93%, 94%, 95%, 96%, 97%, 98%, 99%, or 100% identical to the amino acid sequence selected from the group consisting of SEQ ID NOS:1-3297, not including any functional domains added fused to the polypeptides (whether N-terminal, C-terminal, or internal), and wherein the 1, 2, 3, 4, or 5 N-terminal and/or C-terminal amino acid residues may be present or absent and when absent are not considered in determining the percent identity.

[0027] As described in the examples that follow, the polypeptides of the disclosure are capable of forming C2 symmetric homodimers with a variety of C2 symmetric cavities, and may be used, by way of non-limiting example, as members of polypeptide libraries for making binding proteins.

[0028] In one embodiments, the polypeptide comprises an amino acid sequence least 75% identical to the amino acid sequence selected from the group consisting of SEQ ID NOS:1-3297, not including any functional domains added fused to the polypeptides (whether N-terminal, C-terminal, or internal), and wherein the 1, 2, 3, 4, or 5 N-terminal and/or C-terminal amino acid residues may be present or absent and when absent are not considered in determining the percent identity. In another embodiment, the polypeptide comprises an amino acid sequence at least 90%, 91%, 92%, 93%, 94%, 95%, 96%, 97%, 98%, 99%, or 100% identical to the amino acid sequence selected from the group consisting of SEQ ID NOS:1-3297, not including any functional domains added fused to the polypeptides (whether N-terminal, C-terminal, or internal), and wherein the 1, 2, 3, 4, or 5 N-terminal and/or C-terminal amino acid residues may be present or absent and when absent are not considered in determining the percent identity. In one embodiment, the polypeptide comprises the amino acid sequence selected from the group consisting of SEQ ID NOS:1-3297, not including any functional domains added fused to the polypeptides (whether N-terminal, C-terminal, or internal), and wherein the 1, 2, 3, 4, or 5 N-terminal and/or C-terminal amino acid residues may be present or absent and when absent are not considered in determining the percent identity. In another embodiment, all residues are included when determining the percent identity relative to the reference polypeptide.

[0029] In one embodiment, amino acid substitutions relative to the reference polypeptide are conservative amino acid substitutions. As used herein, “conservative amino acid substitution” means a given amino acid can be replaced by a residue having similar physiochemical characteristics, e.g., substituting one aliphatic residue for another (such as Ile, Val, Leu, or Ala for one another), or substitution of one polar residue for another (such as between Lys and Arg; Glu and Asp; or Gln and Asn). Other such conservative substitutions, e.g., substitutions of entire regions having similar hydrophobicity characteristics, are known. Polypeptides comprising conservative amino acid substitutions can be tested in any one of the assays described herein to confirm that a desired activity, e.g. antigen-binding activity and specificity of a native or reference polypeptide is retained. Amino acids can be grouped according to similarities in the properties of their side chains (in A. L. Lehninger, in Biochemistry, second ed., pp. 73-75, Worth Publishers, New York (1975)): (1) non-polar: Ala (A), Val (V), Leu (L), Ile (I), Pro (P), Phe (F), Trp (W), Met (M); (2) uncharged polar: Gly (G), Ser (S), Thr (T), Cys (C), Tyr (Y), Asn (N), Gln (Q); (3) acidic: Asp (D), Glu (E); (4) basic: Lys (K), Arg (R), His (H). Alternatively, naturally occurring residues can be divided into groups based on common side-chain properties: (1) hydrophobic: Norleucine, Met, Ala, Val, Leu, Ile; (2) neutral hydrophilic: Cys, Ser, Thr, Asn, Gln; (3) acidic: Asp, Glu; (4) basic: His, Lys, Arg; (5) residues that influence chain orientation: Gly, Pro; (6) aromatic: Trp, Tyr, Phe. Non-conservative substitutions will entail exchanging a member of one of these classes for another class. Particular conservative substitutions include, for example; Ala into Gly or into Ser; Arg into Lys; Asn into Gln or into H is; Asp into Glu; Cys into Ser; Gln into Asn; Glu into Asp; Gly into Ala or into Pro; His into Asn or into Gln; Ile into Leu or into Val; Leu into Ile or into Val; Lys into Arg, into Gln or into Glu; Met into Leu, into Tyr or into Ile; Phe into Met, into Leu or into Tyr; Ser into Thr; Thr into Ser; Trp into Tyr; Tyr into Trp; and/or Phe into Val, into Ile or into Leu.

[0030] In one embodiment, the polypeptides further comprise one or more functional domains. Any suitable functional polypeptide domain may be used, including but not limited to a detectable domain (fluorescent protein, amino acid tag, etc.) and a targeting domain (cell penetrating peptide, antibody, etc.).

[0031] In another embodiment, the disclosure provides homodimers of the polypeptides if the invention. As described in the examples that follow, the polypeptides of the disclosure are capable of forming C2 symmetric homodimers with a variety of C2 symmetric cavities that are capable of binding a wide range of C2 symmetric compounds. In one embodiment, the homodimer comprises a ligand bound in a pocket/cavity of the homodimer. In one such embodiment, the ligand comprises a C2 symmetric compound.

[0032] In a further embodiment, the disclosure provides compositions comprising 2, 5, 10, 15, 25, 50, 100, 250, 500, 750, 1000, 1250, 1500, 1750, 2000, 2250, 2500, 2750, or more different polypeptides or homodimers of any embodiment of the disclosure. In these embodiments, the polypeptides and homodimers may be used, for example, to screen for compounds that bind one or more of the polypeptides or homodimers.

[0033] In another embodiment, the disclosure provides nucleic acids encoding the polypeptide of any preceding embodiment of the disclosure. The nucleic acid sequence may comprise single stranded or double stranded RNA (such as an mRNA) or DNA in genomic or cDNA form, or DNA-RNA hybrids, each of which may include chemically or biochemically modified, non-natural, or derivatized nucleotide bases. Such nucleic acid sequences may comprise additional sequences useful for promoting expression and/or purification of the encoded polypeptide, including but not limited to polyA sequences, modified Kozak sequences, and sequences encoding epitope tags, export signals, and secretory signals, nuclear localization signals, and plasma membrane localization signals. It will be apparent to those of skill in the art, based on the teachings herein, what nucleic acid sequences will encode the polypeptides of the disclosure.

[0034] In a further embodiment, the disclosure provides expression vectors comprising a nucleic acid of the disclosure operatively linked to a suitable control sequence. “Expression vector” includes vectors that operatively link a nucleic acid coding region or gene to any control sequences capable of effecting expression of the gene product. “Control sequences” operably linked to the nucleic acid sequences of the disclosure are nucleic acid sequences capable of effecting the expression of the nucleic acid molecules. The control sequences need not be contiguous with the nucleic acid sequences, so long as they function to direct the expression thereof. Thus, for example, intervening untranslated yet transcribed sequences can be present between a promoter sequence and the nucleic acid sequences and the promoter sequence can still be considered “operably linked” to the coding sequence. Other such control sequences include, but are not limited to, polyadenylation signals, termination signals, and ribosome binding sites. Such expression vectors can be of any type, including but not limited plasmid and viral-based expression vectors. The control sequence used to drive expression of the disclosed nucleic acid sequences in a mammalian system may be constitutive (driven by any of a variety of promoters, including but not limited to, CMV, SV40, RSV, actin, EF) or inducible (driven by any of a number of inducible promoters including, but not limited to, tetracycline, ecdysone, steroid-responsive). The expression vector must be replicable in the host organisms either as an episome or by integration into host chromosomal DNA. In various embodiments, the expression vector may comprise a plasmid, viral-based vector, or any other suitable expression vector.

[0035] In one embodiment, the disclosure provides host cell comprising the polypeptide, homodimer, composition, nucleic acid, and/or expression vector of any embodiment herein. The host cells can be either prokaryotic or eukaryotic. The cells can be transiently or stably engineered to incorporate the nucleic acids or expression vector of the disclosure, using techniques including but not limited to bacterial transformations, calcium phosphate co-precipitation, electroporation, or liposome mediated-, DEAE dextran mediated-, polycationic mediated-, or viral mediated transfection.

[0036] In a further embodiment, the disclosure provides pharmaceutical composition comprising:

[0037] (a) the polypeptide, homodimer, composition, nucleic acid, expression vector, and/or host cell of any embodiment herein; and

[0038] (b) a pharmaceutically acceptable carrier.

[0039] The pharmaceutical composition may comprise in addition to the component of the disclosure (a) a lyoprotectant; (b) a surfactant; (c) a bulking agent; (d) a tonicity adjusting agent; (e) a stabilizer; (f) a preservative and/or (g) a buffer.

[0040] The disclosure also provides methods for using, the polypeptide, homodimer, composition, nucleic acid, expression vector, host cell, and/or pharmaceutical composition of any embodiment herein for any suitable use as disclosed herein, such as binding C2 symmetric compounds for diagnostic and therapeutic use, and other uses as disclosed in the examples that follow.

[0041] The disclosure also provides methods for designing polypeptides that form homodimers containing tunable symmetric pockets, as disclosed in the examples that follow.

### EXAMPLES

[0042] Function follows form in biology, and the binding of small molecules requires proteins with pockets that match the shape of the ligand. When designing proteins that might bind symmetric ligands, protein homooligomers with matching symmetry are advantageous as each protein subunit can make identical interactions with the ligand. Here we describe a general approach to generate a library of hyperstable C2 symmetric proteins with pockets of diverse size and shape. We first designed repeat proteins that sample a continuum of curvatures but maintain low helical rise, then docked these into C2 symmetric homodimers to generate an extensive range of C2 symmetric cavities. 101 designs were experimentally characterized, and of these, the geometry of 31 were confirmed by small angle X-ray scattering. These scaffolds provide a rich set of proteins for binding a wide range of C2 symmetric compounds.

[0043] Cyclic two fold (C2) symmetric molecules are common in biology and medicine, such as HIV protease inhibitors (Erickson and Kempf 1994), iron sulfur clusters (Bandyopadhyay, Chandramouli, and Johnson 2008), and the chlorophyll special pair found in photosynthetic reaction centers (Oie, Maggiora, and Christoffersen 2009). To bind such compounds, C2 symmetric protein homodimers are advantageous because each protein monomer can make identical interactions with an asymmetric unit of the small molecule. A large set of protein scaffolds with C2 symmetric binding pockets spanning a wide range of sizes and shapes that can be functionalized without compromising stability could provide new enzymes, therapeutics, and light harvesting proteins, but neither such sets nor methods to generate them currently exist.

[0044] We set out to develop a general solution to the challenge of creating scaffold proteins for binding C2 symmetric ligands. We aimed to design repeat proteins that could house a central cavity, but with a wide range of elliptical, rather than perfectly circular, shapes to enable binding of a wider range of C2 symmetric ligands. We chose an overall design architecture consisting of repeat proteins which curve around a central axis that are docked into C2 symmetric homodimers surrounding an elliptical central cavity (FIG. 1A). By employing repeat proteins with minimal rise along the superhelical axis from one repeat unit to the next, we favor C2 arrangements with the ends of the two monomers in contact. Advantages of this conception are that the cavities can be vastly diverse in size, shape, and chemical composition (lined with different sidechain functional groups). Additionally, as the cavity lining residues are on the exterior of the monomers, the protein hydrophobic core is separated from the binding pocket; as such, functionalization to create binding interactions for specific compounds is unlikely to destabilize either the monomers or the dimer interface.

[0045] To implement this strategy to design C2 symmetric protein homodimers containing central cavities, we first set out to create a diverse library of monomeric units to dock into various symmetric homodimer orientations. We began by generating a new set of helical repeat protein monomers with structures specifically tailored for building C2 symmetric binding pockets. We selected a range of superhelical curvature, rise, and radius parameters, such that a four-unit repeat protein would approximate a half-circle and the resulting dimer would form an ellipse. Superhelical curvature and rise correspond to the rotation around and translation along the central superhelical axis per repeat unit respectively, and radius is the distance of the protein from this axis; these quantities are calculated from the center of mass of one repeat unit to the center of mass of the next repeat unit (see FIG. 3 for schematic) using the RepeatParameterFilter within the Rosetta' macromolecular modeling suite (Leman et al. 2020). Model building to approximate a half circle suggested the rotation between each repeat should be between 0.7 rad and 1.1 rad, the rise less than 1.5 A per repeat, and the radius between 10 Å and 22 Å. We hypothesized that, when docked into dimers, proteins with these parameters would create pockets that could accommodate ligands of diverse sizes and shapes. FIG. 1D/E and FIG. 4 illustrate how radius, curvature, and rise control the shape of repeat proteins and highlights the type of monomeric proteins we aimed to make.

[0046] Unbiased sampling rarely yields repeat proteins with our desired helical parameters, and only in cases where the lengths of the two helices in a repeat differ by 6-7 residues (FIG. 5). We thus developed methods for biasing fragment assembly towards desired regions of repeat protein parameter space; at each fragment insertion (made identically in each repeat unit), the deviation from a target set of superhelical parameters is computed and the sum of these deviations is added to the coarse-grained score function previously used. With this biased assembly protocol, we were able to focus sampling on repeat protein structures with the desired superhelical parameters at all combinations of helix length (see FIG. 1C, FIG. 5, and FIG. 6); almost all trajectories with the biased fragment assembly protocol generate proteins with desired helical parameters (see FIG. 5). The new method led to poorly packed structures at a higher rate than the previous method (see FIG. 7), but after filtering these poorly packed structures out, we obtained far more curved repeat proteins at all helix length combinations using the new biased fragment assembly protocol (see FIG. 5). Obtaining a correct balance of scoring terms is critical, and these results suggest our helical parameter terms may be too strong, leading to structures that get stuck in poorly folded states that satisfy desired helical parameters. Despite this limitation, we were able to generate 100,000 curved repeat protein backbones to use for subsequent design.

[0047] These backbones were subjected to combinatorial sequence optimization using a Rosetta™ Scripts FastDesign protocol with repeat protein symmetry (applied through the RepeatProteinRelaxMover), which makes identical moves to each repeat unit during sequence design and minimization. The designs were then extended or shortened by up to half a repeat unit based on the energy per residue of the terminal helix to eliminate terminal helices that may be disordered due to limited contacts to the rest of the structure. The top 12,000 designs based on a combination of energy, packing, and sequence-structure agreement, were submitted for abinitio folding simulations. Designs for which the sequence strongly encoded the structure in de novo structure prediction calculations (see Methods; the lowest energy structures are close to the designed structure), 2,500 in total, were used in subsequent docking and design calculations.

[0048] We next set out to create C2 symmetric homodimers with central cavities using these 2,500 curved repeat proteins. We extended a symmetric docking approach by adding a requirement that the docks create one of two classes of closed circular structure with either two N to C terminal interfaces (head to tail dimer) or both N to N and C to C terminal interfaces (head to head+tail to tail dimer) (See FIG. 11). This docking protocol generated 1 million docked structures. We subsequently removed docks that had small interfaces (less than 10 contacting residues) that were likely to form weak interfaces, as well as docks that had excessively large interfaces (greater than 24 contacts) which could lead to poor behavior before dimerization due to having many exposed hydrophobic residues. This yielded a set of about 100,000 docks for both classes of homodimers that were subjected to interface sequence optimization using a Rosetta™ Scripts FastDesign protocol (Maguire et al. 2021) with C2 symmetry (DiMaio et al. 2011). FIG. 1D shows how a single monomer can be docked into many distinct orientations creating diverse central cavities, and FIG. 1E shows examples of the diversity of proteins and pockets that can be achieved by docking diverse monomers into various C2 symmetric orientations. The top 1,200 homodimer designs were selected based on a combination of interface energy, interface shape complementarity, and buried unsatisfied hydrogen bonds for both classes of closed circular homodimers (see FIG. 8 for design flowchart).

[0049] With the ability to generate these proteins computationally, we set out to characterize a diverse set of examples (see FIG. 9) with pockets varying in the volume and shape (see FIG. 10), approximated through the three principal axes, which were calculated on poly-alanine backbones to represent the maximum possible size of the pockets. FIG. 2 shows representative biochemical data for six successful homodimer designs and one design that failed to form the designed homodimer. In total, we characterized 101 designs including 77 head to tail dimers and 24 head to head+tail to tail dimers. 44 of the designs expressed enough soluble, well behaved, protein for further characterization. Five of these designs were determined to be soluble aggregate by subsequent analysis. Of the 39 remaining proteins, 38 were characterized by circular dichroism (CD), and of these, 36 were found to be helical and hyperstable (maintaining 80% helicity on average at 95° C.). All 36 of these proteins had nearly identical CD spectrums upon cooling back to 25° C. One design characterized by CD appeared helical as expected, but was not hyperstable, while another had low helical signal.

[0050] We subsequently used Small Angle X-ray Scattering (SAXS) to characterize the 37 designs that appeared helical by CD (including the one with low stability); of these, 31 had experimental SAXS profiles that closely matched profiles predicted for the corresponding design model, suggesting that they have the correct ellipsoidal shape in solution. In total, 31% of designs (31 of 101) are well-expressing soluble dimers that show experimental scattering profiles that closely match predicted profiles based on their design models. The failed design, D_3_337 is interesting, because it is hyperstable and helical by CD, but its SAXS data suggests it dimerizes to a different shape than designed. Designed proteins are disclosed in Tables 1-2 as SEQ ID NOS:1-3297

### Discussion

[0051] The C2 symmetric homodimer proteins created in this study have central cavities with diverse shapes that could accommodate a range of C2 symmetric ligands. These proteins have high thermal stability and solubility in a range of buffer conditions; some designs were concentrated over 100 mg/ml and remained soluble in crystal screens indefinitely. Because the protein core is distinct from the pocket, they should have high mutation tolerance during functionalization. The methods described here enable focused sampling of repeat protein conformational space beyond perfectly closing toroid structures; we used these methods to create a library of curved repeat proteins, but they could also be used to create a library of perfectly flat repeat proteins or to match the helical parameters of DNA or other helical biomolecules.

[0052] The dimeric ellipsoidal architecture of the proteins created here leads to a wide range of pocket sizes and geometries. A similar approach could be applied to the generation of higher order symmetric complexes to create pockets suitable for binding higher order symmetric molecules. Furthermore, many of the head to tail C2 symmetric designs described here could be connected into single chain proteins with short structured loops or long flexible linkers enabling them to be redesigned to bind arbitrary asymmetric small molecules or host enzyme active sites. The number of design models presented here already rivals the size of common fold classes found in the Protein Data Bank, and there is nearly unlimited ability to create more. Docking C2 symmetric compounds into these scaffolds can be carried out efficiently by superimposing the symmetry axes of the small molecule and protein scaffold, sampling the two remaining rigid body degrees of freedom (the translation along and rotation around the symmetry axes), and, for each dock, designing the protein interface to maximize interactions with the ligand.

### Methods

### Synthetic Gene Constructs

[0053] All genes were ordered from Integrated DNA Technologies (IDT). In a few cases, genes were not synthesizable by IDT, and were instead ordered from Genscript. A His-tag containing TEV protease cleavage site and short linkers were added to the N-terminus of protein sequences.

[0054] In cases in which the protein lacked a Tryptophan residue, a single Tryptophan was added to the short N-terminal linker following the TEV protease cleavage site to help with protein concentration quantification by A280. The protein sequence along with linker (GHHHHHHGSGSGENLYFQSGSGSSS (SEQ ID NO: 3298) or GHHHHHHGSGSGENLYFQSGWSGSSS (SEQ ID NO: 3299)) was reverse translated into DNA using a custom python script that attempts to maximize host-specific codon adaptation index(Sharp and Li 1987) and IDT synthesize-ability, which includes optimizing whole gene and local GC content as well as removing repetitive sequences. Finally, a TAA stop codon was appended to the end of each gene. Genes were delivered cloned into pET-29b+between NdeI/XhoI restriction sites.

### Protein Expression and Purification

[0055] Proteins were transformed into Lemo21(DE3) E. coli from New England Biolabs (NEB) and then expressed as 0.5-liter cultures in 2-liter flasks using Studiers M2 autoinduction media with 50 ug/mL kanamycin. The cultures were either grown at 37° C. for ˜6-8 hours and then ˜18° C. overnight (˜14 hours) or at 37° C. the entire time ˜14 hours. Cells were pelleted at 4,000 g for 10 minutes, after which the supernatant was discarded. Pellets were resuspended in 30 ml lysis buffer (25 mM Tris HCl pH 8, 300 mM NaCl, 30 mM imidazole, 1 mM PMSF, 0.75% CHAPS, 1 mM DNase, 10 mM Lysozyme, with Thermo Scientific Pierce protease inhibitor tablet). Cell suspensions were lysed by microfluidizer or sonication, and the lysate was clarified at 20,000g for ˜30 minutes. The His-tagged proteins were bound to Ni-NTA resin (Qiagen) during gravity flow and washed with a wash buffer (25 mM Tris HCl pH 8, 300 mM NaCl, 30 mM imidazole). Protein was eluted with an elution buffer (25 mM Tris HCl pH 8, 300 mM NaCl, 300 mM imidazole). The His-tag was removed by TEV cleavage, followed by IMAC purification to remove TEV protease. The flowthrough was collected and concentrated prior to further purification by SEC/FPLC on a Superdex™ 200 increase 10/300 GL column in TBS (25 mM Tris pH 8.0, 300 mM NaCl).

### Circular Dichroism

[0056] Circular dichroism spectra were measured with an AVIV Model 420 DC or Jasco J-1500 CD spectrometer. Samples were 0.25 mg/mL in TBS (25 mM Tris pH 8.0, 150 mM NaCl), and a 1-mm path length cuvette was used. The CD signal was converted to mean residue ellipticity by dividing the raw spectra by N×C×L×10, where N is the number of residues, C is the concentration of protein, and L is the path length (0.1 cm).

### Size Exclusion Chromatography with Multi-Angle Light Scattering

[0057] Purified samples after the initial SEC run, samples were pooled then concentrated or diluted as needed to a final concentration of 2 mg/mL. 100 uL of each sample was then run through a high-performance liquid chromatography system (Agilent) using a Superdex™ 200 10/300 GL column. These fractionation runs were coupled to a multi-angle light scattering detector (Wyatt) in order to determine the absolute molecular weights for each designed protein as described previously (Fallas et al. 2017).

### Small Angle X-Ray Scattering

[0058] Small-Angle X-ray Scattering (SAXS) was collected at the SIBYLS High Throughput SAXS Advanced Light Source in Berkeley, Calif. (Dyer et al. 2014). Beam exposures of 0.3 s for 10.2 s resulted in 33 frames per sample. Data was collected at low (˜1 mg/mL) and high (˜2-3 mg/mL) protein concentrations in SAXS buffer (25 mM Tris pH 8.0, 150 mM NaCl, 2% glycerol). The Sibyls™ website was used to analyze the data for high and low centration samples and average the best dataset. If there was obvious aggregation over the 33 frames, only the data points before aggregation arose were used in the Gunier region, otherwise, all data was included for the Gunier region. All data was used for Porod and Wide regions. The averaged file was used with scatter.jar to remove data points with outlier residuals in the Gunier region. Finally, the data was truncated at 0.25 q. This dataset was then compared to the predicted SAXS profile based on the design model using the FoxS SAXS server, and volatility ratio (Vr) was calculated to quantify how well the predicted and data matched the experimental data. Proteins with Vr of less than 2.5 were considered to be folded to the designed quaternary shape.

### Backbone Generation of Curved Repeat Protein Monomers

[0059] We generate repeat protein backbones using Rosetta™ Remodel which takes a blueprint file as input and performs Monte Carlo fragment assembly using a coarse-grained energy function to accept or reject moves (made identically in each repeat). A blueprint file describes a fixed-length protein by its secondary structure assignment at each residue position. The repeating unit of the repeat proteins we generate includes helix 1, loop 1, helix 2, and loop 2. We limit our search to short “ideal” loops, having a length of 2 to 4 residues, while helix lengths range from 12 to 30 residues. Within these limits, we enumerate all possible secondary structure length combinations and output a unique blueprint file for each combination. A Rosetta™ Scripts XML is used to run Rosetta™ Remodel on each blueprint to create four repeat unit proteins. Remodel begins by picking 3mer and 9mer fragments for each position based on the assigned secondary structure and then performs fragment assembly with these fragments. Trajectories begin with ideal helices at helical positions and extended loops. The protocol first makes fragment insertions at loop regions in order to quickly fold the largely extended protein chain into a globular protein, before performing fragment assembly over the full length of the protein. For this work, we ran 1 million total trajectories evenly distributed over all allowable secondary structure combinations (3249 total combinations), which yielded ˜300 models per secondary structure combination. We first did this with a traditional coarse-grained energy function supplemented with higher resolution, backbone only, residue pair motifs harvested from the PDB which generate better packed and designable protein models (Brunette et al. 2020; Fallas et al. 2017).

[0060] The aforementioned protocol failed to generate our desired shape of repeat proteins, specifically curved repeat proteins with low helical rise (<1.5 Å per repeat unit) and significant helical curvature (between 0.7 rad and 1.1 rad) that approximated a half-circle. To overcome this limitation and develop a method to focus sampling towards arbitrary repeat protein shapes, we developed three new score terms based on the helical parameters rise, radius, and curvature (often called omega or twist). At every fragment assembly step during the Monte Carlo protocol, the helical parameters of the protein are calculated as described elsewhere (Hauser et al. 2017) and then the deviation from a specified set of helical parameters is computed, and the sum of these deviations is added to the coarse-grained score function used earlier. The weight of these score terms is increased over the course of the trajectory. Furthermore, the score terms allow the user to use a linear or quadratic penalty based on the deviation or to set the penalty to 0 before or after the desired value is reached. The ability to turn off the penalty is important if the user wants to achieve a rise=0, in which case radius approaches infinity, which will cause scoring problems to arise for the radius term. In our study, we set the penalties to quadratic. Small scale testing showed this was appropriate, so we moved to larger-scale sampling identical to that described in the preceding paragraph, which generated an abundance of repeat protein with our desired helical parameters. We note that many trajectories got stuck in extended or spaghetti-like models that satisfied our desired helical parameters well at the expense of the other score terms.

### Sequence Design and Selection of Curved Repeat Proteins

[0061] The fragment assembly methods used to generate backbones will often create loops that are quite different (>0.4 Å rmsd) than those found in nature by recombining fragments in novel ways, which has been found to lower folding accuracy in subsequent in silico forward folding simulations (Brunette et al. 2020) and potentially during in vitro experiments too. To overcome this problem, every backbone is first subjected to a protocol that optimizes loops by replacing both unique loops in the repeat unit with all combinations of loops found in the PDB with <0.4 Å rmsd and then propagating these changes to each of the other repeat units (Brunette et al. 2020). This often results in input monomers creating several output monomers, although some inputs fail to find any loops with rmsd <0.4 Å and are discarded at this step.

[0062] After loop optimization, backbones are subjected to sequence optimization using a Rosetta™ Scripts XML. First, explicit repeat protein symmetry is applied to the computational model such that all subsequent steps of sequence mutation and backbone minimization will be done identically at each repeat position in the protein. The application of symmetry also reduces the design space to that of a single repeat unit plus its interface with neighboring units regardless of the number of repeat units (always 4 units in this work), which reduces the subsequent design time ˜4 fold. Next, PSSM generated from the sequence of 9-mer fragments found in the PDB and having low rmsd to the design model is applied to the protein to bias the score function towards the design of structurally appropriate amino acids. This 9-mer based structural PSSM is particularly helpful in the design of loop residues, i.e., in placing prolines and glycines in highly favorable positions where either inaccuracy in the Rosetta™ energy function would favor other residues or the lowest energy residue is not the best residue because of negative design considerations that exist outside absolute energetics. Similarly, this PSSM also helps in placing appropriate helix capping motifs such as aspartate, asparagine, serine, or threonine. Finally, the score function is modified to include an explicit penalty for buried unsatisfied hydrogen bonds (Coventry and Baker 2020).

[0063] FastDesign™ is then performed, which alternates between sequence optimization (amino acid mutations and rotamer exchanges) and backbone minimization through four cycles during which the weight of the repulsive energy term is ramped from low to high. LayerDesign is used during design to make sure the protein surface positions only mutate to polar residues. The protein core layer definition used allows mutations to small polar residues (D, H, N, Q, S, and T), but the buried unsatisfied penalty either prevents these entirely or forces them into fully satisfied polar networks which are sometimes desirable (Boyken et al. 2016). Next FastRelax is run which alternates between rotamer packing and backbone minimization similar to FastDesign. These two steps are then repeated, after which various filter metrics and scores are calculated to quantify the protein energetics, core packing, secondary structure shape complementarity, sequence-structure agreement, and buried unsatisfied hydrogen bonds.

[0064] Top designs based on protein energetics, core packing, secondary structure shape complementarity, sequence-structure agreement, and buried unsatisfied hydrogen bonds were subjected to forward folding simulations. Folding funnels with a forward folding metric, the area to the left of the folding funnel from the lowest energy point to +8 rosetta energy units, of less than 25 were chosen for subsequent design steps.

[0065] After forward folding, the N-terminus and C-terminus of the proteins were optimized by replacing terminal helices making minimal contacts to the rest of the protein with better packing termini. This was done by allowing the termini to extend or shorten by up to half a repeat unit to optimize the score per residue of the protein. We attempted to maintain the protein length as close to four repeat units as possible but favored lengthening the protein by half a repeat unit over shortening the protein. In the case that both termini were better when extended by half a repeat unit, which is functionally similar to truncating by half a repeat unit, we would make two combinations of the protein, first, a protein with the N-terminus extended and C-terminus truncated and second, a protein with the N-terminus truncated and C-terminus extended.

[0066] Finally, the whole protein surface was allowed to redesign for three reasons. The first was to break up the repetitive nature of the protein sequence, which makes DNA synthesis easier. The second was to allow better electrostatic complimentary on the surface because repulsive charges were sometimes forced next to each other due to the explicit repeat symmetry used to initially design the monomers. The third was to remove surface-exposed hydrophobic residues.

### C2 Symmetric Docking

[0067] We adapted a previous symmetric docking approach (Fallas et al. 2017) by adding a requirement that the N and C terminal helices of the monomers contact (at least one pair of residues on each terminus within 14 Å) in the dimer; this leads to head to tail homodimers with a closed circular structure and a central cavity along the axis of symmetry. Subsequently, we removed docks with small interfaces (less than 10 contacting residues) and excessively large interfaces (greater than 24 contacts).

### C2 Symmetric Protein-Protein Interface Design

[0068] Interface design was conducted by running a Rosetta™ Scripts XML that is highly similar to the one used to design monomers. The critical difference being that only interface residues are allowed to mutate during interface design. Interface residues are defined as residues with Ca atoms in one protein chain being within 10 Å of Ca atoms in the other protein chain. Additionally, C2 symmetry is applied during interface design, which serves a similar function to the repeat protein symmetry used during monomer design. C2 symmetry forces chain 1 and chain 2 to maintain identical sequences (and rotamers) during sequence optimization and identical torsion angles during minimization.

[0069] A similar trajectory of FastDesign, FastRelax, FastDesign, FastRelax is run as during monomer design. Loops, as defined by DSSP, are prevented from designing. Additionally, glycine and proline residues are not allowed to mutate, and no other positions can mutate to glycine or proline. Finally, we use an amino acid composition score term along with an explicit penalty for buried unsatisfied hydrogen bonds in order to favor the creation of small fully satisfied polar networks at the interface. This is done in the hopes of preventing the creation of large hydrophobic interfaces that might be prone to aggregation and to increase binding specificity of the interfaces. Finally, filter metrics and scores were calculated to quantify the binding energy, interface packing, interface shape complementarity, interface SASA, and buried unsatisfied hydrogen bonds across the interface.

Lengthy table referenced here
US20230114825A1-20230413-T00001
Please refer to the end of the specification for access instructions.

Lengthy table referenced here
US20230114825A1-20230413-T00002
Please refer to the end of the specification for access instructions.

### REFERENCES

[0070] An, Linna, and Gyu Rie Lee. 2020. “De Novo Protein Design Using the Blueprint Builder in Rosetta.” Current Protocols in Protein Science/Editorial Board, John E. Coligan . . . [et Al.] 102 (1): e116.
[0071] Bandyopadhyay, Sibali, Kala Chandramouli, and Michael K. Johnson. 2008. “Iron-sulfur Cluster Biosynthesis.” Biochemical Society Transactions. doi.org/10.1042/bst0361112.
[0072] Boyken, Scott E., Zibo Chen, Benjamin Groves, Robert A. Langan, Gustav Oberdorfer, Alex Ford, Jason M. Gilmore, et al. 2016. “De Novo Design of Protein Homo-Oligomers with Modular Hydrogen-Bond Network-Mediated Specificity.” Science 352 (6286): 680-87.
[0073] Brunette, T. J., Matthew J. Bick, Jesse M. Hansen, Cameron M. Chow, Justin M. Kollman, and David Baker. 2020. “Modular Repeat Protein Sculpting Using Rigid Helical Junctions.” Proceedings of the National Academy of Sciences of the United States of America 117 (16): 8870-75.
[0074] Brunette, T. J., Fabio Parmeggiani, Po-Ssu Huang, Gira Bhabha, Damian C. Ekiert, Susan E. Tsutakawa, Greg L. Hura, John A. Tainer, and David Baker. 2015. “Exploring the Repeat Protein Universe through Computational Protein Design.” Nature 528 (7583): 580-84.
[0075] Cohen-Ofri, Ilit, Maurice van Gastel, Joanna Grzyb, Alexander Brandis, Iddo Pinkas, Wolfgang Lubitz, and Dror Noy. 2011. “Zinc-Bacteriochlorophyllide Dimers in de Novo Designed Four-Helix Bundle Proteins. A Model System for Natural Light Energy Harvesting and Dissipation.” Journal of the American Chemical Society. doi.org/10.1021/ja202054m.
[0076] Coventry, Brian, and David Baker. 2020. “Protein Sequence Optimization with a Pairwise Decomposable Penalty for Buried Unsatisfied Hydrogen Bonds.” Cold Spring Harbor Laboratory. doi.org/10.1101/2020.06.17.156646.
[0077] DiMaio, Frank, Andrew Leaver-Fay, Phil Bradley, David Baker, and Ingemar André. 2011. “Modeling Symmetric Macromolecular Structures in Rosetta3.” PloS One 6 (6): e20450.
[0078] Doyle, Lindsey, Jazmine Hallinan, Jill Bolduc, Fabio Parmeggiani, David Baker, Barry L. Stoddard, and Philip Bradley. 2015. “Rational Design of α-Helical Tandem Repeat Proteins with Closed Architectures.” Nature 528 (7583): 585-88.
[0079] Dyer, Kevin N., Michal Hammel, Robert P. Rambo, Susan E. Tsutakawa, Ivan Rodic, Scott Classen, John A. Tainer, and Greg L. Hura. 2014. “High-Throughput SAXS for the Characterization of Biomolecules in Solution: A Practical Approach.” Methods in Molecular Biology 1091: 245-58.
[0080] Erickson, J., and D. Kempf 1994. “Structure-Based Design of Symmetric Inhibitors of HIV-1 Protease.” Archives of Virology. Supplementum 9: 19-29.
[0081] Faiella, Marina, Concetta Andreozzi, Rafael Tones Martin de Rosales, Vincenzo Pavone, Ornella Maglio, Flavia Nastri, William F. DeGrado, and Angela Lombardi. 2009. “An Artificial Di-Iron Oxo-Protein with Phenol Oxidase Activity.” Nature Chemical Biology 5 (12): 882-84.
[0082] Fallas, Jorge A., George Ueda, William Sheffler, Vanessa Nguyen, Dan E. McNamara, Banumathi Sankaran, Jose Henrique Pereira, et al. 2017. “Computational Design of Self-Assembling Cyclic Protein Homo-Oligomers.” Nature Chemistry 9 (4): 353-60.
[0083] Foight, Glenna Wink, Zhizhi Wang, Cindy T. Wei, Per Jr Greisen, Katrina M. Warner, Daniel Cunningham-Bryant, Keunwan Park, et al. 2019. “Multi-Input Chemical Control of Protein Dimerization for Programming Graded Cellular Responses.” Nature Biotechnology 37 (10): 1209-16.
[0084] “FoXS Server: Fast X-Ray Scattering.” n.d. Accessed Sep. 17, 2020.

[0085] modbase.compbio.ucsf.edu/foxs/.
[0086] Gibney, B. R., S. E. Mulholland, F. Rabanal, and P. L. Dutton. 1996. “Ferredoxin and Ferredoxin-Heme Maquettes.” Proceedings of the National Academy of Sciences of the United States of America 93 (26): 15041-46.
[0087] Greenfield, Norma J. 2006. “Using Circular Dichroism Spectra to Estimate Protein Secondary Structure.” Nature Protocols 1 (6): 2876-90.
[0088] Hauser, Kevin, Yiqing He, Miguel Garcia-Diaz, Carlos Simmerling, and Evangelos Coutsias. 2017. “Characterization of Biomolecular Helices and Their Complementarity Using Geometric Analysis.” Journal of Chemical Information and Modeling 57 (4): 864-74.
[0089] Hura, Greg L., Helen Budworth, Kevin N. Dyer, Robert P. Rambo, Michal Hammel, Cynthia T. McMurray, and John A. Tainer. 2013. “Comprehensive Macromolecular Conformations Mapped by Quantitative SAXS Analyses.” Nature Methods 10 (6): 453-54.
[0090] Hura, Greg L., Angeli L. Menon, Michal Hammel, Robert P. Rambo, Farris L. Poole 2nd, Susan E. Tsutakawa, Francis E. Jenney Jr, et al. 2009. “Robust, High-Throughput Solution Structural Analyses by Small Angle X-Ray Scattering (SAXS).” Nature Methods 6 (8): 606-12.
[0091] Leman, Julia Koehler, Brian D. Weitzner, Steven M. Lewis, Jared Adolf-Bryfogle, Nawsad Alam, Rebecca F. Alford, Melanie Aprahamian, et al. 2020. “Macromolecular Modeling and Design in Rosetta: Recent Methods and Frameworks.” Nature Methods 17 (7): 665-80.
[0092] Maguire, Jack B., Hugh K. Haddox, Devin Strickland, Samer F. Halabiya, Brian Coventry, Jermel R. Griffin, Surya V. S. R. K. Pulavarti, et al. 2021. “Perturbing the Energy Landscape for Improved Packing during Computational Protein Design.” Proteins 89 (4): 436-49.
[0093] Norn, Christoffer, Basile I. M. Wicky, David Juergens, Sirui Liu, David Kim, Doug Tischer, Brian Koepnick, et al. 2021. “Protein Sequence Design by Conformational Landscape Optimization.” Proceedings of the National Academy of Sciences of the United States of America 118 (11). doi.org/10.1073/pnas.2017228118.
[0094] Oie, Tetsuro, Gerald M. Maggiora, and Ralph E. Christoffersen. 2009. “Structural Characterization of a Special-Pair Chlorophyll Dimer Model of P700.” International Journal of Quantum Chemistry. doi.org/10.1002/qua.560220716.
[0095] Park, Jooyoung, Brinda Selvaraj, Andrew C. McShan, Scott E. Boyken, Kathy Y. Wei, Gustav Oberdorfer, William DeGrado, et al. 2019. “De Novo Design of a Homo-Trimeric Amantadine-Binding Protein,” December. doi.org/10.7554/eLife.47839.
[0096] Pyles, Harley, Shuai Zhang, James J. De Yoreo, and David Baker. 2019. “Controlling Protein Assembly on Inorganic Crystals through Designed Protein Interfaces.” Nature 571 (7764): 251-56.
[0097] “SAXS FrameSlice.” n.d. Accessed Sep. 17, 2020. sibyls.a1s.1b1.gov/ran. Schneidman-Duhovny, Dina, Michal Hammel, John A. Tainer, and Andrej Sali. 2013. “Accurate SAXS Profile Computation and Its Assessment by Contrast Variation Experiments.” Biophysical Journal 105 (4): 962-74.
[0098] Sharp, P. M., and W. H. Li. 1987. “The Codon Adaptation Index—a Measure of Directional Synonymous Codon Usage Bias, and Its Potential Applications.” Nucleic Acids Research 15 (3): 1281-95.
[0099] Ueda, George, Aleksandar Antanasijevic, Jorge A. Fallas, William Sheffler, Jeffrey Copps, Daniel Ellis, Geoffrey B. Hutchinson, et al. 2020. “Tailored Design of Protein Nanoparticle Scaffolds for Multivalent Presentation of Viral Glycoprotein Antigens.” eLife 9 (August). doi.org/10.7554/eLife.57659.

LENGTHY TABLES
The patent application contains a lengthy table section. A copy of the table is available in electronic form from the USPTO web site (https://seqdata.uspto.gov/?pageRequest=docDetail&DocID=US20230114825A1). An electronic copy of the table will also be available from the USPTO upon request and payment of the fee set forth in 37 CFR 1.19(b)(3).

We claim:

1. A polypeptide comprising an amino acid sequence at least 50% identical to the amino acid sequence selected from the group consisting of SEQ ID NOS:1-3297, not including any functional domains added fused to the polypeptides (whether N-terminal, C-terminal, or internal), and wherein the 1, 2, 3, 4, or 5 N-terminal and/or C-terminal amino acid residues may be present or absent and when absent are not considered in determining the percent identity.

2. The polypeptide of claim 1, comprising an amino acid sequence at least 75% identical to the amino acid sequence selected from the group consisting of SEQ ID NOS:1-3297, not including any functional domains added fused to the polypeptides (whether N-terminal, C-terminal, or internal), and wherein the 1, 2, 3, 4, or 5 N-terminal and/or C-terminal amino acid residues may be present or absent and when absent are not considered in determining the percent identity.

3. The polypeptide of claim 1, comprising an amino acid sequence at least 90% identical to the amino acid sequence selected from the group consisting of SEQ ID NOS:1-3297, not including any functional domains added fused to the polypeptides (whether N-terminal, C-terminal, or internal), and wherein the 1, 2, 3, 4, or 5 N-terminal and/or C-terminal amino acid residues may be present or absent and when absent are not considered in determining the percent identity.

4. The polypeptide of claim 1, comprising the amino acid sequence selected from the group consisting of SEQ ID NOS:1-3297, not including any functional domains added fused to the polypeptides (whether N-terminal, C-terminal, or internal), and wherein the 1, 2, 3, 4, or 5 N-terminal and/or C-terminal amino acid residues may be present or absent and when absent are not considered in determining the percent identity.

5. The polypeptide of claim 1, wherein all residues are included when determining the percent identity relative to the reference polypeptide.

6. The polypeptide of claim 1, wherein amino acid substitutions relative to the reference polypeptide are conservative amino acid substitutions. 7 The polypeptide of claim 1, further comprising one or more functional domains.

8. A homodimer of the polypeptide of claim 1.

9. The homodimer of claim 8, comprising a ligand bound in a pocket of the homodimer.

10. The homodimer of claim 9, wherein the ligand comprises a C2 symmetric compound.

11. A composition comprising 2 or more different polypeptides or homodimers of claim 1.

12. A nucleic acid encoding the polypeptide of claim 1.

13. An expression vector comprising the nucleic acid of claim 12 operatively linked to a suitable control sequence.

14. A host cell comprising the expression vector of claim 13.

15. A pharmaceutical composition comprising:
(a) the polypeptide claim 1; and
(b) a pharmaceutically acceptable carrier.

16. A method for using the polypeptide of claim 1 for any suitable use as disclosed herein.

The application's sequence listing, which the Patent Office published only in electronic form, follows.

SEQUENCE LISTING (3299 sequences)

SEQ ID NO: 1 - protein, 182 aa, synthetic construct
  REGION 1..182: note = Synthetic
DEQDRARFSAELLEILAKLIEKISGDPESAEIMKEVIRRVLQAFKEGDEEKLQRLYEQVVALYGAAALSLLAIDIERVSGDPESAEIMKEVIRRVLQAFKEGDEEKLRRLYLQVGALFAAALLSKLAKFIEEVSGDPESAEIMKEVIRRVLQAFKEGDERKLLELYLLVVRLFYEALRSKEA

SEQ ID NO: 2 - protein, 174 aa, synthetic construct
  REGION 1..174: note = Synthetic
SEEEILLLIAETIARLMEELAKHYGNEEAKQIIREVVQLLREAKQTGDPEELRKILMLVQALLMAAQMLILAKEYGNEEAKQIIREVVQLLREAKQTGDPRELKKIALLVWALWLAALMLILAKEYGNEEAKQIIREVVQLLREAKQTGDPEELIKIYQKVFELILRAEELIHS

SEQ ID NO: 3 - protein, 182 aa, synthetic construct
  REGION 1..182: note = Synthetic
DEVIELSELIRLLMEFAKILLRQAGDEKALEILELLLELLLRAIQSGDLEKVLKALEVIHMSALIVYGVIVAIAFLREAGDEKALEILELLLELLLRAIQSGDLEKVLKALEVIALSAQIVVFMIKAIQYLREAGDEKALEILELLLELLLRAIQSGDLEKVKKALLLIQSVALEVIYRIRS

SEQ ID NO: 4 - protein, 158 aa, synthetic construct
  REGION 1..158: note = Synthetic
DEDRTRARNLAEEALQLAEQAGDPEIFETVQELLKRVSRAKSEEEIKELSLRILAILFALLALRLAKQAGDPEIFETVQELLKRVSRAKSEEEIKHLLFRILAIGNALLALQLAKQAGDPEIFETVQELLKRVSRAKSDEEIIRLASIIFEILLRLLL

SEQ ID NO: 5 - protein, 231 aa, synthetic construct
  REGION 1..231: note = Synthetic
SREQRIEFLKHAAEFGFRQAELLFRLVEEAGDEEALELLKQTLRLVYEALERVFREFLELFEQGSFEQLLQNAKILLLLAMAAAYSALAALLYILVKQAGDEEALELLKQTLRLVYEALERVFREFLELFEQGSFEQLLLNARILALLATAASLSALAALLYILVKQAGDEEALELLKQTLRLVYEALERVFREFLELFEQGSFEELLELALILAELAYRASAEAQRALTR

SEQ ID NO: 6 - protein, 201 aa, synthetic construct
  REGION 1..201: note = Synthetic
DEELETLLRLAQLQIRHTLEELGVSEEQLRQHLKEIWKLILENLKQVFETMKRLGVPPRLALQLLIVLALALAQIFVLLLLLGVSEEQLRQHLKEIWKLILENLKQVFETMKRLGVPPELALKLLVTLARALALIFWALVLLGVSEEQLRQHLKEIWKLILENLKQVFETMKRLGVPPELALRLLSLIALQIALQFAVELL

SEQ ID NO: 7 - protein, 165 aa, synthetic construct
  REGION 1..165: note = Synthetic
DETELIVDRAKIRAEEIISQLKKAGDEELMEILLQLVLRVLRAKDPREIETLAKVIIAIARAAWIFILLKEAGDEELMEILLQLVLRVLRAKDPREIETLAKVIYAIAGAAWIFLLLKEAGDEELMEILLQLVLRVLRAKDPREIETLAHEIALVAVEALLFLMS

SEQ ID NO: 8 - protein, 161 aa, synthetic construct
  REGION 1..161: note = Synthetic
DYDKTLVRALAYLIREVAKLLGDEELTENARQIVRDFKNARSEEELEFIMISAMVLAGAAVILALATLLGDEELTENARQIVRDFKNARSEKELKHIWFSAWVLWLAAMILAMAKRLGDEELTENARQIVRDFKNARSDEELRFIFRSAVELDLAARELLL

SEQ ID NO: 9 - protein, 194 aa, synthetic construct
  REGION 1..194: note = Synthetic
DLLEALVDLARVLVELAEKAGVDPKALELVIRIVIEALQRGDLELAWLAAFVAAALFNVIVAERAGVDPKALELVIRIVIEALQRGDLELAVLAWTVAMALLMVIKAEEAGVDPKALELVIRIVIEALQRGDVNLALLALYVARALLMVIKAEEAGVDPKALELVIRIVIEALQRGDNHLAAHALILALELLLS

SEQ ID NO: 10 - protein, 213 aa, synthetic construct
  REGION 1..213: note = Synthetic
SELELLAILAETLASVAEYLAGTDPELSELVKRIRQKLKEAMQAGDKEKIELVMLAASAIVLAALALRLAGTDPELSELVKRILQKLKEAMQAGDKEKIELVMLAAFAIWAAAAALHNAGTDPELQELVKRILQKLKEAMQAGDKRKIYLVVLAAMAIWAAAGALLMAGTDPELSELVKRILQKLKEAMQAGDHEKILRVVVLAYEIFLRARS

SEQ ID NO: 11 - protein, 168 aa, synthetic construct
  REGION 1..168: note = Synthetic
DERELLKRALQHLSERAKQIKQQGNLELAIRILALVAMLASALYMLSGDPEALRLITELLRLVSELAKQIKQQGNLELAIEMLFLVAMIAGLLYMLSGDPEALRLITELLRLVSELAKQIKQQGNLELAIQMLLLVALIALLLHFVSGDPEALEILQELLELIRELSS

SEQ ID NO: 12 - protein, 168 aa, synthetic construct
  REGION 1..168: note = Synthetic
SEREQIKRTLRQLSQTARNIARRGNLEDAILILWVVAALASVLYLHSGDPEALRLITELLRLVSELAKQIKQQGNLELAIWMLFAVAGIAALLYMVSGDPEALRLITELLRLVSELAKQIKQQGNLEEAILMLALVAFIAVLLLMLSGDPEARELIRELLRIIEELLN

SEQ ID NO: 13 - protein, 158 aa, synthetic construct
  REGION 1..158: note = Synthetic
SHLEAFVLVAEMMRQLVKLAGDEEQFRLVKELFERALRALQEGDEETLRLLWYVLFALWMLILVKDAGDEEQFRLVKELFERALRALQEGDKKTLLLLYFVLLALFMLILVKKAGDEEQFRLVKELFERALRALQEGDEETLKRLSELLNRLKLEILQ

SEQ ID NO: 14 - protein, 183 aa, synthetic construct
  REGION 1..183: note = Synthetic
DEYELLHQLVRILILFALHLAEKMGDPEASELARELLQRLKQALQYSEEEATKLVKYLVWFVGVMALIVLALEIAKQMGDPEASELARELLQRLKQALQYSEKEATKLVEYLWHFVLVMVFIVLALEIAKQMGDPEASELARELLQRLKQALQYSHEEALRIVLQLYVLVVEMLYHVRKLEEA

SEQ ID NO: 15 - protein, 161 aa, synthetic construct
  REGION 1..161: note = Synthetic
DYLKTLVRLYAYLIRELAKLLGDEELTENARQIVRDFKNARSEEELEFIFISALVLVMAAVILALATLLGDEELTENARQIVRDFKNARSEKELKHIAFSAGVLGLAALILFMAKRLGDEELTENARQIVRDFKNARSDEELRFIFRSAVELALAARELLL

SEQ ID NO: 16 - protein, 168 aa, synthetic construct
  REGION 1..168: note = Synthetic
SHEEQLTKNLRDLSRLAKEVKQQGNLERAILILYAVAMIASALFLLSGDPEALRLITELLRLVSELAKQIKQQGNLELAIFMLAFVAFIAVALYFLSGDPEALRLITELLRLVSELAKQIKQQGNLELALRVLVMVALIAFLLLSLSGDPEALELIEELLRLIKKLNS

SEQ ID NO: 17 - protein, 168 aa, synthetic construct
  REGION 1..168: note = Synthetic
DYQESITRVLRELSERAKQIKQQGNLELAIRILWNVAIFASLLYDLSGDPEALRLITELLRLVSELAKQIKQQGNLELAIEMLLLVADIAGWLYMVSGDPEALRLITELLRLVSELAKQIKQQGNLELAIQNLLLVMLIALVLHMLSGDPEALEILEELLKLIQELSS

SEQ ID NO: 18 - protein, 206 aa, synthetic construct
  REGION 1..206: note = Synthetic
LLLEDMILWAVLVINRAIEAGDPEDREKARRLAQLALEIVFRGDLEKAQLISMIVLAILVLIFAKQAGDPEDIEKARRLTELAEEISQRGDLEKAQLISMIVLAILVLIFAKQAGDPEDIEKARRLTELAEEISQRGDLEKAQLISMIVWAIMVLIFAKQAGDPEDIEKARRLTELAEEISQRGDLEKAERILKEVMVIMVRIMLS

SEQ ID NO: 19 - protein, 133 aa, synthetic construct
  REGION 1..133: note = Synthetic
SMELKLAWLAAEWAGVPKEEVSEYLLLALEVIKRAGVPPEIAAMAIHAFIWAAWAGVPKEEVSEYILLALEVIKRAGVPPEIAWMAIQAFIFAAKKGVPKEEVSEYILLALEVIKRAGVPPEYAFVAIYRAIL

SEQ ID NO: 20 - protein, 231 aa, synthetic construct
  REGION 1..231: note = Synthetic
SREEIIESLRRLAEIFSQLARVLFEHVEEAGDEEALELLKQTLRLVYEALERVFREFLELFEQGSFEQLLQNALILFFLALAASASALAAVLYILVKQAGDEEALELLKQTLRLVYEALERVFREFLELFEQGSFEELELNAMILAWLAGAASYSALAALLYILVKQAGDEEALELLKQTLRLVYEALERVFREFLELFEQGSFEELIRNALDLAYLAAHASAEAFLALLS

SEQ ID NO: 21 - protein, 174 aa, synthetic construct
  REGION 1..174: note = Synthetic
NEEEFLRSWVEHVIRLAERVLEIAGLPPEESKQIRELLQRAMEFARSEDPEDIRKAWLIAGVALFIVVASFLLLLAGLPPEESKQIRELLQRAMEFARSEDPRDIKKALFIAGVAAYIVAASLFLQQAGLPPEESKQIRELLQRAMEFARSEDPRDISEAWNIAARALSLVATS

SEQ ID NO: 22 - protein, 231 aa, synthetic construct
  REGION 1..231: note = Synthetic
SREEIIESLRRAAEILSQLARVLFEHVEEAGDEEALELLKQTLRLVYEALERVFREFLELFEQGSFEQLLQNAWILFLLALAAVASALAAVLYILVKQAGDEEALELLKQTLRLVYEALERVFREFLELFEQGSFEELELNAMILAWLAGAASYSALAALLYILVKQAGDEEALELLKQTLRLVYEALERVFREFLELFEQGSFEELIRNALDLGYLAGHASLEAFLALLS

SEQ ID NO: 23 - protein, 196 aa, synthetic construct
  REGION 1..196: note = Synthetic
LLEIRLIELLIEALRHAIRHLMKHVKEAGDEEVYRELLELLQEATEFLRKASQTGDPRLLDIALMIFGIIMASAMIWLLMKEVKEAGDEEVYRELLELLQEATEFLRKASQRGDPRLLNIAYIIFMIIFLSAAIWLLMKRVKEAGDEEVYRELLELLQEATEFLRKASQTGDPRLLIHALSIFLYIYHIALEHLTS

SEQ ID NO: 24 - protein, 222 aa, synthetic construct
  REGION 1..222: note = Synthetic
SRLELLILEAQFYASAVKSLAELAGDEELKELVRRILESLREALQRNDEELAKMVFLIALAVVYAALVLLIAQLAGDEELKELVRRILESLREALQRNDKELAHMVALIAGAVLYAAAVLIIAQLAGDEELKELVRRILESLREALQRNDRELAFMVALIAAAVLYAALVLLIAQEAGDEELKELVRRILESLREALQRNDEELALKVASLAFEVYMRALRL

SEQ ID NO: 25 - protein, 253 aa, synthetic construct
  REGION 1..253: note = Synthetic
SRKIEAYVFLVRIFLLLEQLLLLVKERGDEEAIESIRKAIELARQMIQELRTATTEEQYRKALAVAFLLLILALLFLLLLRVKERGDEEAIESIRKAIELARQMIQELKTATTEEQYRKALAVAFLLLILALLFLLLLRVKERGDEEAIESIRKAIELARQMIQELKTATTEEQYRKALAVAFLLLILALLFLLLLRVKERGDEEAIEHIRKAIELARQMIQELKTATTERQYRRAYLVALYLLLLAELFLEE

SEQ ID NO: 26 - protein, 253 aa, synthetic construct
  REGION 1..253: note = Synthetic
SRKVEAYVFLIRIFLLLEELLLLVKERGDEEAIESIRKAIELARQMIQELKTATTEEQYRKALAVAFLLLILALLFLLLLRVKERGDEEAIESIRKAIELARQMIQELKTATTEEQYRKALAVAFLLLILALLFLLLLRVKERGDEEAIESIRKAIELARQMIQELKTATTEEQYRKALAVAFLLLILALLFLLLLRVKERGDEEAIEHIRKAIELARQMIQELKTATTEKQYYRAYIIAQLLLILAELFLKN

SEQ ID NO: 27 - protein, 253 aa, synthetic construct
  REGION 1..253: note = Synthetic
DEKERAHQFLLEIFYLLELLLRLVKRRGDEEAIESIRKAIELARQMIQELRTATTEEQYRKAYAVAFLLLILALLFLLLLLVKERGDEEAIESIRKAIELARQMIQELKTATTEEQYRKAYAVAFLLLILALLFLLLLLVKEYGDEEAIESIRKAIELARQMIQELKTATTEEQYRKAYAVAFLLLILALLFLLLLLVKRRGDEEAIEHIRKAIELARQMIQELKTATTKEQYLHALIVAYALITLAELFLRS

SEQ ID NO: 28 - protein, 298 aa, synthetic construct
  REGION 1..298: note = Synthetic
DRELTHLFNEAEELSQLIEELTEEIRKLLPPGESEKQTQIFQELLEAIQQILKRAVELTQRGNTEEAETFMRLAVLLAIAVVLSAEIIRLTEEIRKLLPPGESEKQTQIFQELLEAIQQILKRAVELTQRGNTEEAETFMRLAVLLAIAVVLSAEIIRLTEEIRKLLPPGESEKQTQIFQELLEAIQQILKRAVELTQRGNTEEAETFMRLAVLLAIAVVLSAEIIRLTEEIRKLLPPGESEKQTQHFQELLEEIQKNLKRAVELTQRGNTEKAERLMKAAVLLARAVVTLAKVIKVS

SEQ ID NO: 29 - protein, 298 aa, synthetic construct
  REGION 1..298: note = Synthetic
FDRLRRLLFEARVLSELIIYLTELIRKLLPPGESEKQTQIFQELLEAIQQILKRAVELTQRGNTEEAETFMRLAVLLAIAVVLSAEIIRLTEEIRKLLPPGESEKQTQIFQELLEAIQQILKRAVELTQRGNTEEAETFMRLAVLLAIAVVLSAEIIRLTEEIRKLLPPGESEKQTQIFQELLEAIQQILKRAVELTQRGNTKEAETFMLLAVLLAIAVVLSAEIIRLTEEIRKLLPPGESEKQTQIFQELLEAIQQILKRAVELTQRGNTEEALEFMLRAVNLALFVVQRAEVIKHQ

SEQ ID NO: 30 - protein, 222 aa, synthetic construct
  REGION 1..222: note = Synthetic
DEKEREHLKLLELAIKVLQLALEAGDPEFFQSAREIRERAERLQENGDLEEMQKLIEFLKLLLLALLVLKLAKEAGDPEFVQSAREILERAKRLQENGDLEEMQKLIEFLKLLLLALLVLKLAKEAGDPEFVQSAREILERAKRLQENGDLEEMQKLIEFLKLLLLALLVLKLAKEAGDPEFVQSAREILERAKRLQENGDLEEMQKLIKHLELLLHELRYL

SEQ ID NO: 31 - protein, 222 aa, synthetic construct
  REGION 1..222: note = Synthetic
DEIYQLFAELLILALLVRRLAYEAGDPEFHQSAREIEERAKRLQENGDLEEMQKLIEFLKLLLLALLVLKLAKEAGDPEFVQSAREILERAKRLQENGDLEEMQKLIEFLKLLLLALLVLKLAKEAGDPEFVQSAREILERAKRLQENGDLEEMQKLIEFLKLLLLALLVLKLAKEAGDPEFVQSAREILERAKRLQENGDHRRMLELIHFLQLLLTQLRLL

SEQ ID NO: 32 - protein, 207 aa, synthetic construct
  REGION 1..207: note = Synthetic
SRLELEAKEHAYSVRLLAKENGQEEFEETVQEMFRRVKKAGDEEEIQWIILLLIALLLALEVLRLAKENGQEEFEETVQEMFRRVKKAGDEEEIQWIILLLIALFLALEVLRLAKENGQEEFEETVQEMFRRVKKAGDEEEIQWIILLLIALFLALEVLRLAKENGQEEFEETVQEMFRRVKKAGDEELIIRIIHYLRRLFQALERL

SEQ ID NO: 33 - protein, 207 aa, synthetic construct
  REGION 1..207: note = Synthetic
DELKLRVQVLANAIQVYARYLGDPESLEQAQELLRRARNAKDEEELRHLLLVLQVMLLALEIIFLALELGDPESLEQAQELLRRASNAKDEEELRHLLLVLQVMLLALQIIRLAKELGDPESLEQAQELLRRASNAKDRRELKHLLLVLQVMLLALQIIKLAKELGDPESLEQAQELLRRASNAKDEEELYQLYIILRIMLDRLREI

SEQ ID NO: 34 - protein, 242 aa, synthetic construct
  REGION 1..242: note = Synthetic
DELVLEAIELASRIIYIAKELYRRTGDPEAQKISEIARELRQRVEENGKDEEELKLIILLLQAMLLAVQIIKYAEELYRRTGDPEAQKISEIAKELLQRVVENGKDEEELKLIILLLQAMLLAVQIIKYAEELYRRTGDPEAQKISEIAKELLQRVVENGKDEEELKLIILLLQAMLLAVQIIKYAEELYRRTGDPEAQKISEIAKELLQRVVENGKDEEELRKIIYELREMLLQVRLLLEL

SEQ ID NO: 35 - protein, 227 aa, synthetic construct
  REGION 1..227: note = Synthetic
DELLIEALRLAIRLERFARRAAAKDPRQFELARQIVEKLREMVRRGDEEQIRKLSLLVKAILLAIELLEQAERAAAKDPRQFELARQIVEKLLEMVQRGDEEQIRKLSLLVKAILLAIELLEQAERAAAKDPRQFELARQIVEKLLEMVQRGDEEQIRKLSLLVKAILLAIELLEQAERAAAKDPRFFELARQIVEKLLEMVQRGDELRIQVLSDSVLTILRLIELS

SEQ ID NO: 36 - protein, 249 aa, synthetic construct
  REGION 1..249: note = Synthetic
DLAHHARRLVVKASQLAEQLYEKTGDERAQQTFEQAQRLLQRVYELLEAGDEEKLKLLILALEAMILVLEASKLAQELYEKTGDERAQQTFEQAQRLLQRVYELLEAGDEEKLKLLILALEAMILVLEASKLAQELYEKTGDERAQQTFEQAQRLLQRVYELLEAGDEEKLKLLILALEAMILVLEASKLAQELYEKTGDERAQQTFEQAQRLLQRVYELLEAGDEEKLRRLILELRLIILRLRVLLNS

SEQ ID NO: 37 - protein, 249 aa, synthetic construct
  REGION 1..249: note = Synthetic
SLAEEAQELVLRASLLAKLLYEKTGDERAQQTFEQAQRLLQRVRELLEAGDEEKLKLLILALEAMILVLEASILAQELYEKTGDERAQQTFEQAQRLLQRVYELLEAGDEEKLKLLILALEAMILVLEASKLAQELYEKTGDERAQQTFEQAQRLLQRVYELLEAGDEHKLRLLILALRAMILVLEASKLAQELYEKTGDERAQQTFEQAQRLLQRVYELLEAGDLEKLFELISELYHIISRLQFLKQS

SEQ ID NO: 38 - protein, 183 aa, synthetic construct
  REGION 1..183: note = Synthetic
DELERLAVTLFSELVKASDPRMHQIAEELLKAVREGDEEKIRLLLLLAEALKLFEELMKASDPRMQQIAQELQKAVEEGDEEKIRLLLLLAEALKLFEELMKASDPRMQQIAQELQKAVEEGDEEKIRLLLLLAEALKLFEELMKASDPQMQQTAQELQKAVEEGDEKKIRELLDLAEVLIRS

SEQ ID NO: 39 - protein, 202 aa, synthetic construct
  REGION 1..202: note = Synthetic
DLLEEELLEFASNIEELYKRYGDEQAREAVQRAREVYEAGDEEQIRKALLLLQLIYTMIEIEELYKKYGDEQAREAVQRAREVFEAGDEEQIRKALLLLQLIKTMIEIEELYKKYGDEQAREAVQRAREVFEAGDEEQIRKALLLLQLIKTMIEIEELYKKYGDEEAREAVQRAREVFEAGDEKQIFKALLLLEVIKRLIEH

SEQ ID NO: 40 - protein, 202 aa, synthetic construct
  REGION 1..202: note = Synthetic
ALLLLQLRQTIREIENFYREYGDEQAREAVQRAREVFEAGDEEQIRKALLLLQLIKTMIEIEELYKKYGDEQAREAVQRAREVFEAGDEEQIRKALLLLQLIKTMIEIEELYKKYGDEQAREAVQRAREVFEAGDEEQIRKALLLLQLIKTMIEIEELYKKYGDEEAREAVQRAREVFEAGDERQILRAYLLLEYIKLLIEL

SEQ ID NO: 41 - protein, 238 aa, synthetic construct
  REGION 1..238: note = Synthetic
SEIYELVARVLTLALRLENFARITGDKEFSEQARELRRRVHETLQRVSEEEALRTIQIYMLVLLVLLLALQLYEQAKKTGDKEFSEQARELARRVFETLQRVSEEEALRTIQIYMLVLLVLLLALQLYEQAKKTGDKEFSEQARELARRVFETLQRVSEEEALRTIQIYMLVLLVLLLALQLYEQAKKTGDKEFSEQARELARRVFETLQRVSEEEAERTIREALLTLEYLLRHLELS

SEQ ID NO: 42 - protein, 238 aa, synthetic construct
  REGION 1..238: note = Synthetic
DEIQELVLLVLELALQLETLARQTGDKEFSEQARELARRVFETLQRVSEEEALRTIQIYMLVLLVLLLALRLYLAAERTGDKEFSEQARELARRVFETLQRVSEEEALRTIQIYMLVLLVLLLALELYLHAEKTGDKEFSEQARELARRVFETLQRVSEEEARRTIFIYSLVLLVLLLALQLYEQAKKTGDKEFSEQARELARRVFETLQRVSEEEALRTILEVYARLLVLLIYLQFS

SEQ ID NO: 43 - protein, 213 aa, synthetic construct
  REGION 1..213: note = Synthetic
DKLEEKIIRALSFLFEAHHFAELAGDPELSEQLQELQRRLEEATDEEEIELLIKMALAFAWLVIAFFFAKRAGDPELSEQLQELVRRLKEATDEEEIELLIKMALAFAWLVIAFYYAKEAGDPELSEQLQELVRRLKEATDEEEIELLIRMAKAFAFLVIAFYYAKQAGDPELSEQLQELVRRLKEATDEEEIKLLIKRAFETAHRVLVHYEL

SEQ ID NO: 44 - protein, 213 aa, synthetic construct
  REGION 1..213: note = Synthetic
DDLELKRTEANFYLAAAIFLARLAGDPELSEQLQELLRRLEEATDEEEIELLIKMALAFAWLVIAFYYAKLAGDPELSEQLQELVRRLKEATDEEEIELLIKMALAFAWLVIAFFFALLAGDPELSEQLQELVRRLKEATDEEEIELLIRMALAFAFLVIAFYYAERAGDPELSEQLQELVRRLKEATDEEEIRLLIHRALEVAARVLVYYFS

SEQ ID NO: 45 - protein, 262 aa, synthetic construct
  REGION 1..262: note = Synthetic
DMQEEKVIRLLSELRELLFQMRRTWERAGDPQAQELVELAQQIIEKAEEALRRGDEEKLERLMQLIKVIILLIRLFKLLQEMKRTWEEAGDPQAQELVELAQQIIEKAIEAVRRGDEEKLERLMQLIKVIILLIRLFKLLQEMKRTWEEAGDPQAQELVELAQQIIEKAIEAVRRGDEEKLERLMQLIKVIILLIRLFKLLQEMKRTWEEAGDPKAQELVELAQQIIEKAIEAVRRGDERLLQELLDLIKVIIRLIEVYKKS

SEQ ID NO: 46 - protein, 222 aa, synthetic construct
  REGION 1..222: note = Synthetic
DDIETLRLEAESLARIAEFLAKQQGNDELLEAVQELLRSIIEAIQRGDEKKIRIILLLAQAVFLAVKAFIIAHQQGNDELLEAVQELLRSIIEAIQRGDEKKIRIILLLAQAVYLAVSAFTMAKEQGNDELLEAVQELLRSIIEAIQRGDEHLIIIILILAHAVYLAVSAFTMAKEQGNDELLEAVQELLRSIIEAIQRGDREKIIKINALAVEVFDHVLLH

SEQ ID NO: 47 - protein, 262 aa, synthetic construct
  REGION 1..262: note = Synthetic
LMQLIKVEILLRELFRLYAEMVFEWENAGDPQAQELVELARQILEKANEAYRRGDEEKLERLMQLIKVIILLIRLFKLLQEMKRTWEEAGDPQAQELVELAQQIIEKAIEAVRRGDEEKLERLMQLIKVIILLIRLFKLLQEMKRTWEEAGDPQAQELVELAQQIIEKAIEAVRRGDEEKLERLMQLIKVIILLIRLFKLLQEMKRTWEEAGDPQAQELVELAQQIIEKAIEAVRRGDEEKLEHLLLEIELIITIIETYKRS

SEQ ID NO: 48 - protein, 210 aa, synthetic construct
  REGION 1..210: note = Synthetic
DELEEVRQLLEQVLLLAEKLGDPEAQETARQLLKKFKRFADDPEFARELLTLVEVLFMLLEVLRLAQELGDPEAQETARQLLKKFKRFADDPEFARELLILVEVLFMLLEVLRLAQELGDPEAQETARQLLKKFKRFADDPQFALELYLLVLVLFMLLEVLRLAQELGDPEAQETARQLLKKFKRFADDPQFAAQLEALVSELYTKLLRL

SEQ ID NO: 49 - protein, 219 aa, synthetic construct
  REGION 1..219: note = Synthetic
DELFLQIRLLVELILKMAKELGQPELWESAQEILRLFEEAQRAGDDELVRRILLFAQILYLVAKILKMAKELGQPELWESAQEILRLFEEAQRAGDDRLVYLILLFAQILYLVAKILKMAKELGQPELWESAQEILRLFEEAQRAGDLELVKRILLFAQILYLVAKILKMAKELGQPELWESAQEILRLFEEAQRAGDDELVQRILLRAERLYEEAEEL

SEQ ID NO: 50 - protein, 161 aa, synthetic construct
  REGION 1..161: note = Synthetic
SELEQLVEIIAHVIRTIARYLGDEELTENARQIVRDFKNARSEEELEFIFTSAQVLYLAAIILLIAQILGDEELTENARQIVRDFKNARSEEELEFIFLSALVLSAAALILIMAKELGDEELTENARQIVRDFKNARSEEELKEILQRAVELLSLALRLLA

SEQ ID NO: 51 - protein, 161 aa, synthetic construct
  REGION 1..161: note = Synthetic
DLLELRVRLLALDIEQIARELGDEELTENARQIVRDFKNARSEEELEFIFTSAQVLSLAALILEMAKELGDEELTENARQIVRDFKNARSEEELEFIFLSALVLSLAALILIMAKELGDEELTENARQIVRDFKNARSEEELREILRRAVRLSSIAFEKRT

SEQ ID NO: 52 - protein, 210 aa, synthetic construct
  REGION 1..210: note = Synthetic
DRLETEILILILEALLLALRAGNPEYRETVRELEKQLKKAKSEEELQRILTFARILYLIVRAFLLAKEAGNPEYLETVRELLKQLKKAKSEEELQRILTFARILYLIVRAFLLAKEAGNPEYLETVRELLKQLKKAKSEEELQRILTFARILYLIVRAFLLAKEAGNPEYLETVRELLKQLKKAKSEEELQRILHRAEKLYLQVESFLNS

SEQ ID NO: 53 - protein, 210 aa, synthetic construct
  REGION 1..210: note = Synthetic
SETETRIEELIFQAELLARLAGNPEYLETVRELLKQLKKAKSEEELQRILTFARILYLIVRAFLLAKEAGNPEYLETVRELLKQLKKAKSEEELQRILTFARILYLIVRAFLLAKEAGNPEYLETVRELLKQLKKAKSEEELERILLFARILYFIVRAFLLAKEAGNPEYLETVRELLKQLKKAKSEEELHRILERAVRLYVEVESFLRS

SEQ ID NO: 54 - protein, 225 aa, synthetic construct
  REGION 1..225: note = Synthetic
DLVEEWAQRAAQLILQLYLNAEFLGDPEFLQIARELHRKLRQALERGSIEDLLVIWWAVSAVLLIMKLYQLAKKLGDPEFLQIARELLRKLYQALERGSIEDLLVIWWAVSAVLLIMKLYILAKELGDPEFLQIARELLRKLYQALERGSIEDLLVIWWAVSAVLLIMKLYILAKELGDPEFLQIARELLRKLYQALERGSIRDLHEIFFEVLRVLLEMEFFIRH

SEQ ID NO: 55 - protein, 250 aa, synthetic construct
  REGION 1..250: note = Synthetic
SEEIEKVLRILFEIIVLAHSIRLHGSDEAAKEILELAIQLLQEVEEADRRGDDEKLRELMEIARVLLLLVKIVLLALRIERYGSDEAAKEILELAIQLLQEVEEAKRRGDDEKLRELMEIARVLLLLVKIVLLALQIEQYGSDEAAKEILELAIQLLQEVEEAKRRGDDEKLRELMLIARVLLLLVKIVLLALQIEQYGSDEAAKEILELAIQLLQEVEEAKRRGDDEKLRELLRIALRLLSEVRLHLEL

SEQ ID NO: 56 - protein, 250 aa, synthetic construct
  REGION 1..250: note = Synthetic
SEEFERVLELLLRILFLAYQIRNYGSDEAAKEILELAIQLLQEVEEARRRGDDEKLRELMEIARVLLLLVKIVLLALQIEQYGSDEAAKEILELAIQLLQEVEEAKRRGDDEKLRELMEIARVLLLLVKIVLLALQIEQYGSDEAAKEILELAIQLLQEVEEAKRRGDDEKLRELMEIARVLLLLVKIVLLALQIEQYGSDEAAKEILELAIQLLQEVEEAKRRGDDEKLRELMEIAERLLEQVEHVLRS

SEQ ID NO: 57 - protein, 222 aa, synthetic construct
  REGION 1..222: note = Synthetic
SEREELLHRARVLARIAEVIAREQGNDELLEAVQELLRSIIEAIQRGDEKKIRIILLLAQAVYLAVRAFQMAKEQGNDELLEAVQELLRSIIEAIQRGDEKKIRIILLLAQAVYLAVSAFTMAKEQGNDELLEAVQELLRSIIEAIQRGDEKKIRIILLLAQAVYLAVSAFTMAKEQGNDELLEAVQELLRSIIEAIQRGDEKKIREILLLAYKVFEEVRFS

SEQ ID NO: 58 - protein, 250 aa, synthetic construct
  REGION 1..250: note = Synthetic
DMEERRVIKLLVTIVSLAFLIHLNGSEEAAKEILELARQLLEEVEEAQRRGDDEKLRELMEIARVLLLLVKIVLLALEIERYGSDEAAKEILELAIQLLQEVEEAKRRGDDEKLRELMEIARVLLLLVKIVLLALQIEQYGSDEAAKEILELAIQLLQEVEEAKRRGDDEKLRELMEIARVLLLLVKIVLLALQIEQYGSDEAAKEILELAIQLLQEVEEAKRRGDDEKLRELMEIARHLLLRVELHLLS

SEQ ID NO: 59 - protein, 213 aa, synthetic construct
  REGION 1..213: note = Synthetic
SEELVRALELAYQVHLIARIANNPEFEETVKEILRRLKQHASDEEHIRQMLELAKAILLAIQVFYIAKKANNPEFEETVKEILRRLKQHASDEEHIRQMLELAKAILLAIQVFLIAKEANNPEFEETVKEILRRLKQHASDEEHIRQMLLLARAILLAIQVFLIAKEANNPEFEETVKEILRRLKQHASDEEHIREMFLLASRILFEIQEFLS

SEQ ID NO: 60 - protein, 207 aa, synthetic construct
  REGION 1..207: note = Synthetic
LRQRLRVEYLIHLIRLLAELAGSEELKEFAREMLERLQRDTTGEDLEKLQQRVKVALLIALIINIAHEAGSEELKEFAREMLERLQRDTTGEDLEKLQRRVKVALLIALIILIAKQAGSEELKEFAREMLERLQRDTTGEDLLKLYLRVLVALLIALIILIAKQAGSEELKEFAREMLERLQRDTTGEDLTELLRLVARALIEALRS

SEQ ID NO: 61 - protein, 207 aa, synthetic construct
  REGION 1..207: note = Synthetic
LEQRREVEYLILLIEVIAYLAGSEELKEFAREMLERLQRDTTGEDLEKLQQRVKVALLIALIISIARKAGSEELKEFAREMLERLQRDTTGEDLEKLQQRVKVALLIALIILIAKQAGSEELKEFAREMLERLQRDTTGEDLEKLQLRVRVALLIALIILIAKQAGSEELKEFAREMLERLQRDTTGEDLYKLLQLVYKALLEAERI

SEQ ID NO: 62 - protein, 207 aa, synthetic construct
  REGION 1..207: note = Synthetic
SEEENHVRLLAEQAILSAEEAGDKEIAETLRELVQRILQLGDLEEFRKLYEQALVILLALLAIKSAKEAGDKEIAETLRELVQRILQLGDLEEFRKLYLQALVILLALLAIKSAKEAGDKEIAETLRELVQRILQLGDHREFLRLFYQALVILVALLAIKSAKEAGDKEIAETLRELVQRILQLGDLRLFLQLLSFALQILTELLEI

SEQ ID NO: 63 - protein, 167 aa, synthetic construct
  REGION 1..167: note = Synthetic
DSLKRLLEDLLRNLREFQREGDKKSIILIAYILVLIARRLGDEEILKQLLKNLLELLRQMQEEGDKESIIEIAKVLVEIARELGDEEILKQLLKNLLELLRQMQEEGDKESIIEIAKVLVEIARELGDEEILKQLLKNLLELFRQMQEEGDEHSLALILYVLTLIKS

SEQ ID NO: 64 - protein, 238 aa, synthetic construct
  REGION 1..238: note = Synthetic
SEHQHWFIEVEYLIKHAHVIAEELGDPDMLEIAKELLRQLKEALQAPTEEEATRLVQYIWWFVVVLLLIALAYLIAKELGDPDMLEIAKELLRQLKEALQAPTEEEATRLVQYIWWFVVVLLLIALAYKIAKELGDPDMLEIAKELLRQLKEALQAPTEEEATRLVQYIWWFVVVLLLIALAYKIAKELGDPDMLEIAKELLRQLKEALQAPTEEEATRLVIEIFLRVEELLQRALLY

SEQ ID NO: 65 - protein, 238 aa, synthetic construct
  REGION 1..238: note = Synthetic
DQYKHWFVEVSKLIHEAHLTAEFLGDPDMLEIAKELLRQLKEALQAPTEEEATRLVQYIWWFVVVLLLIALAYRIALELGDPDMLEIAKELLRQLKEALQAPTEEEATRLVQYIWWFVVVLLLIALAYKIAKELGDPDMLEIAKELLRQLKEALQAPTEEEATRLVQYIWWFVVVLLIIALAYKIAKELGDPDMLEIAKELLRQLKEALQAPTEEEATRLVKEIYREVVRLLVEARVS

SEQ ID NO: 66 - protein, 234 aa, synthetic construct
  REGION 1..234: note = Synthetic
SEVEELAARIRAILHLAETLARLMGDPTAQEIVKELLRQVKQATQYPEEEMYRILKVLYLAAEILYLLVLALRLAREMGDPTAQEIVKELLRQVKQATQYPEEEMYRILKVLYLAAEILLLLVLALKLAREMGDPTAQEIVKELLRQVKQATQYPEEEMYRILKVLYLAAEILLLLVLALKLAREMGDPTAQEIVKELLRQVKQATQYPEEEMYRILKKLYNLALKLLVEVRLS

SEQ ID NO: 67 - protein, 207 aa, synthetic construct
  REGION 1..207: note = Synthetic
SLLEQQVENILREIELIARETGDETALQMAKELLERLKKATSAEEIKELLLQALVLLILVRIYKTAQETGDETALQMAKELLERLKKATSAEEIKELLLQALVLLILVRIYKTAQETGDETALQMAKELLERLKKATSAEEIRELLLQALVLLILVRIYKTAQETGDETALQMAKELLERLKKATSYEEILELYVLALQLLFRVEKY

SEQ ID NO: 68 - protein, 222 aa, synthetic construct
  REGION 1..222: note = Synthetic
DELELIIFEARILARLAHRMAKEQGNDELLEAVQELLRSIIEAIQRGDEKKIRIILLLAQAVYLAVSAFTMAKEQGNDELLEAVQELLRSIIEAIQRGDEKKIRIILLLAQAVYLAVSAFTMAKEQGNDELLEAVQELLRSIIEAIQRGDEKKIRIILLLAQAVYLAVSAFTMAKEQGNDELLEAVQELLRSIIEAIQRGDEEKIFEILLLAYHVFYQVEHH

SEQ ID NO: 69 - protein, 207 aa, synthetic construct
  REGION 1..207: note = Synthetic
SQREHEVRIILNFIKQFAEVTGDETALQMAKELLERLKKATSAEEIKELLLQALVLFILVEIYLIALETGDETALQMAKELLERLKKATSAEEIKELLLQALVLLILVRIYKTAQETGDETALQMAKELLERLKKATSSHEILELLFQALVLLILVRIYKTAQETGDETALQMAKELLERLKKATSLREILELLYLALKLLIYVLEY

SEQ ID NO: 70 - protein, 225 aa, synthetic construct
  REGION 1..225: note = Synthetic
SRLEQLAQQARIIAQQARLLAQRAGDEELEEFVKELIRLITEMTRQGDEEQLRLILLAVQALLLAAQAILYAKKAGDEELEEFVKELIRLITEMTRQGDEEQLRLILLAVQALLLAAQAILYAKKAGDEELEEFVKELIRLITEMTRQGDEEQLRLILLAVEALLIAAQAILYAKKAGDEELEEFVKELIRLITEMTRQGDERKLLHILALVVHLLVRARYELRH

SEQ ID NO: 71 - protein, 249 aa, synthetic construct
  REGION 1..249: note = Synthetic
LLAEQVERLVDIARHFAKLIKQMGDEELARELSEFLRRILQNVEEIFQQNDKEKLELILLAAQVLMLVAVAAYYAVKIKKMGDEELARELSEFLRRILQNVEEIFQQNDKEKLELILLAAQVLMLVAVAAYYAVKIKKMGDEELARELSEFLRRILQNVEEIFQQNDKEKLRLILLAARVLMLVAVAAYYAVKIKKMGDEELARELSEFLRRILQNVEEIFQQNDEEKLQRILEEAFRLLSRAELAYEH

SEQ ID NO: 72 - protein, 241 aa, synthetic construct
  REGION 1..241: note = Synthetic
SDLEEMESLLELLVYYVEVIARLTGDPEVFQLAKELIERIKQAQRARSEEELRRLLELLLMAALLAYLVAFVLLIAFLTGDPEVFQLAKELIERIKQAQRARSEEELRRLLELLHLAALLAYLVAFVLLIAHKTGDPEVFQLAKELIERIKQAQRARSEEELRRLLFLLILAALLAYNVAFVLKIAKETGDPEVFQLAKELIERIKQAQRARSEEELRRLLEELLEEANRAYLLAFLLKLS

SEQ ID NO: 73 - protein, 222 aa, synthetic construct
  REGION 1..222: note = Synthetic
SERKELVLRILYIITRLEELARRLGDEKLLQLVEELEELAIEAFQRGDEETLRRVLLVAKIILMILRLFEYAKQLGDEKLLQLVEELSELAIEAFQRGDEETLRRVLLVAKIILMILRLFEYAKQLGDEKLLQLVEELSELAIEAFQRGDEETLRRVLLVAKIILMILRLFEYAKQLGDEKLLQLVEELSELAIEAFQRGDEETLDRVLFLARLLLHELRRL

SEQ ID NO: 74 - protein, 222 aa, synthetic construct
  REGION 1..222: note = Synthetic
DEREEIVTEILRTILQLETLARRLGDEKLLQLVEELSELAIEAFQRGDEETLRRVLLVAKIILMILRLFEYAKQLGDEKLLQLVEELSELAIEAFQRGDEETLRRVLLVAKIILMILRLFEYAKQLGDEKLLQLVEELSELAIEAFQRGDEETLRRVLIVAKIILMILRLFEYAKQLGDEKLLQLVEELSELAIEAFQRGDEETLHQVLAQALVLLRYLRRL

SEQ ID NO: 75 - protein, 219 aa, synthetic construct
  REGION 1..219: note = Synthetic
DELALEVFQFALRIESLARFAGNEEAKQFVRELQETVLRALQQGDEEQLRKALLALVVMYWALEIQLLAEKAGNEEAKQFVRELQETVLRAWQQGDEEQLRKALLALVVMWWALEIQKLAEEAGNEEAKQFVRELQETVLRAWQQGDEEQLRRALLALEVMWWALEIQKLAEEAGNEEAKQFVRELQETVLRAWQQGDEEQLERALELLYTMWQRLEQQ

SEQ ID NO: 76 - protein, 226 aa, synthetic construct
  REGION 1..226: note = Synthetic
DREDKLFQLLYEILTIAKRIEKQGDPIAELLKELVRRVLEMLKRGDYEEAERIIQFAKLLIQLWQIKQIAEEIEKQGDPIAELLKELVRRVLEMLKRGDYEEAERIIQFAKLLIQLWQIKQIAEEIEKQGDPIAELLKELVRRVLEMLKRGDYEEAERIIQFAKLLIQLWQIKQIAEEIEKQGDPIAEELKELVRRVLEMLKRGDYEEAERVIRYAELLILLFELR

SEQ ID NO: 77 - protein, 234 aa, synthetic construct
  REGION 1..234: note = Synthetic
SEFERLSIEILQIVAQVEYLARLLGDPKLLRLMEQIREEIQRVLASTSEEAKEQLEFIFLSAQILLLVAEVSFIAKDLGDPKLLRLMEQILEEIQRVLASTSEEAKEQLEFIFLSAQILLLVALVSELAKRLGDPKLLRLMEQILEEIQRVLASTSEEAKEQLEFIFLSAQILLLVALVSELAKRLGDPKLLRLMEQILEEIQRVLASTSEEAKEQLRHIYRLALELLLEARFL

SEQ ID NO: 78 - protein, 221 aa, synthetic construct
  REGION 1..221: note = Synthetic
DEKEVEALLLILRVRKLAKQMGDPEMREIVKELEERFRQILQEGDDEKLERLLRQAEAALLIALVYLLAKQMGDPEMREIVKELLERFRQILQEGDDEKLERLLRQAEAALLIALVYLLAKQMGDPEMREIVKELLERFRQILQEGDDEKLERLLEQAEAALLIALVYLLAKQMGDPEMREIVKELLERFRQILQEGDDHKLQRLLLEAQHALERALKYLL

SEQ ID NO: 79 - protein, 222 aa, synthetic construct
  REGION 1..222: note = Synthetic
SEIEKLRIEAESNAYEAELFARLQGNDELLEAVQELLRSIIEAIQRGDEKKIRIILLLAQAVLLAVRAFVIAHEQGNDELLEAVQELLRSIIEAIQRGDEKKIRIILLLAQAVYLAVSAFTMAKEQGNDELLEAVQELLRSIIEAIQRGDEKKIRIILLLAQAVYLAVSAFTMAKEQGNDELLEAVQELLRSIIEAIQRGDEKKIREILELAFKVFTYVESH

SEQ ID NO: 80 - protein, 221 aa, synthetic construct
  REGION 1..221: note = Synthetic
SEEELRARLLIQEVEKLAKQMGDPEMREIVKELLERFRQILQEGDDEKLERLLRQAEAALLIALVYLLAKQMGDPEMREIVKELLERFRQILQEGDDEKLERLLRQAEAALLIALVYLLAKQMGDPEMREIVKELLERFRQILQEGDDEKLERLLLQAEAALLIALVYLLAKQMGDPEMREIVKELLERFRQILQEGDDEKLFELHAKARQALERALKYLL

SEQ ID NO: 81 - protein, 221 aa, synthetic construct
  REGION 1..221: note = Synthetic
SEREAEALRLIRNVEILARLMGDPEMREIVKELLERFRQILQEGDDEKLERLLRQAEAALLIAEVYILALIMGDPEMREIVKELLERFRQILQEGDDEKLRRLLEQAEAALLIALVYVLAKQMGDPEMREIVKELLERFRQILQEGDDEKLKRLLQQAHAALLIALVYLLAKQMGDPEMREIVKELLERFRQILQEGDDKKLRELSNLAYEALLEALEYLS

SEQ ID NO: 82 - protein, 218 aa, synthetic construct
  REGION 1..218: note = Synthetic
DELELRVLRLIRIVERILQRAENPELQEAMEKAIREALRAIESGDEEQLKFASLLLLVVILIWRVYQILQRAENPELQEAMEKAIREALRAIESGDEEQLKFASLLLLVVILIWRVYQILQRAENPELQEAMEKAIREALRAIESGDEEQLKFASLLLLVVILIWRVYQILQRAENPNLRRLMEEAIREALRAIESGDEEQLKQAIRLLRRVIYIFES

SEQ ID NO: 83 - protein, 206 aa, synthetic construct
  REGION 1..206: note = Synthetic
SEEDEVRLLVHILELLARTLGDPETFRQIEELVQRALELAKQGLAEEAILMLLVAYLVLRLLLLALHLGDPETFRQIEELVQRALELAKQGLAEEAILMLLVAYLVLRLLILAQKLGDPETFRQIEELVQRALELAKQGRARHALLMLQVAYLVLRLLILAQELGDPETFRQIEELVQRALELAKQGHAVKALRLLVEAYVLLLEL

SEQ ID NO: 84 - protein, 206 aa, synthetic construct
  REGION 1..206: note = Synthetic
SLENRVELLVYNLLYLARVLGDPETFRQIEELVQRALELAKQGLAEEAILMLLVAYLVLELLLLALELGDPETFRQIEELVQRALELAKQGLAEEAILMLLVAYLVLRLLILAQKLGDPETFRQIEELVQRALELAKQGKALEALFMLLVAYLVLRLLILAQKLGDPETFRQIEELVQRALELAKQGHALEALRILLHAYLVLLRL

SEQ ID NO: 85 - protein, 241 aa, synthetic construct
  REGION 1..241: note = Synthetic
DKIEKMIEEARRLNLEIEILAEQLQRKYGDPQAKRILESAREIVEKVEKSDDERELKILLMILEALWLFLLISLLAKQLQRQYGDPQAKRILESAREIVEKVEKSDDERELKILLMILEALWLFLLISLLAKQLQRQYGDPQAKRILESAREIVEKVEKSDDERELKILLMILEALWLFLLISLLAKQLQRQYGDPEAKRILESAREIVEKVEKSDDERELLRLLLELRYLLQYLEISLKS

SEQ ID NO: 86 - protein, 241 aa, synthetic construct
  REGION 1..241: note = Synthetic
LKIELMIKEALELTLKIQLLALILEREYGDPQAKRILESAREILEKVEKSDDERELKILLMILEALWLFLLISLLAKQLQRQYGDPQAKRILESAREIVEKVEKSDDERELKILLMILEALWLFLLISLLAKQLQRQYGDPQAKRILESAREIVEKVEKSDDERELKILLMILEALWLFLLISLLAKQLQRQYGDPQAKRILESAREIVEKVEKSDDERELKQLLLHLEHLYYTLRLSLRS

SEQ ID NO: 87 - protein, 238 aa, synthetic construct
  REGION 1..238: note = Synthetic
DEKALELYLLVQHLFLRMELLLKKTGDPTAQEALEFLQEILERVRRAKSMEEIQEYLKAAILFALVVELYLKMKRLLEQTGDPTAQEALEFLQEILERVRRAKSMEEIQEYLKAAILFALVVELYLKMKRLLEQTGDPTAQEALEFLQEILERVRRAKSMEEIQEYLKAAILFALVVELYLKMKRLLEQTGDPTAQEALEFLQEILERVRRAKSMEEIIKLLKEAILYAEFVETRLRS

SEQ ID NO: 88 - protein, 238 aa, synthetic construct
  REGION 1..238: note = Synthetic
DDEAIRLYYTVQALFDIMKLQLERTGDPTAQEALEFLQEILERVRRAKSMEEIQEYLKAAILFALVVELYLKMKRLLEQTGDPTAQEALEFLQEILERVRRAKSMEEIQEYLKAAILFALVVELYLKMKRLLEQTGDPTAQEALEFLQEILERVRRAKSMEEIQEYLKAAILFALVVELYLKMKRLLEQTGDPTAQEALEFLQEILERVRRAKSMEEIQFLLREALEFARFVEHLLKS

SEQ ID NO: 89 - protein, 241 aa, synthetic construct
  REGION 1..241: note = Synthetic
DKMEHLAFEIHLIAQEIEFAAYEILKKAGDPRAEELVQQALELVRKAVESTDEEEIKMLLLAVRIILIAAKILILAQRIKEQAGDPRAEELVQQALELVRKAVESTDEEEIKMLLLAVRIILIAAKILILAQRIKEQAGDPRAEELVQQALELVRKAVESTDEEEIKMLLLAVRIILIAAKILILAQRIKEQAGDPRAEELVQQALELVRKAVESTDEREIRRLLFQVLIILLKAFLLLTS

SEQ ID NO: 90 - protein, 222 aa, synthetic construct
  REGION 1..222: note = Synthetic
DRLEEIMIRARLLVRKAHKLAKRAGDPKLLEIVQRILEHLIEALQAGDEEQIRLAYIMASAVLLVVLAFILAKRAGDPKLLEIVQRILEHLIEALQAGDEEQIRLAYIMASAVLLVVLAFILAKRAGDPKLLEIVQRILEHLIEALQAGDEHQIKLAYYMASAVLLVVLAFILAKRAGDPRLLEEVQRILEHLIEALQAGDLRLILQAYVQALVVLLIVRLS

SEQ ID NO: 91 - protein, 241 aa, synthetic construct
  REGION 1..241: note = Synthetic
DEEEQLANQIRVIAIEIKRLAERIKEQAGDPRAEELVQQALELVRKAVESTDEEEIKMLLLAVRIILIAAKILILAQRIKEQAGDPRAEELVQQALELVRKAVESTDEEEIKMLLLAVRIILIAAKILILAQRIKEQAGDPRAEELVQQALELVRKAVESTDEEEIKMLLLAVRIILIAAKILILAQRIKEQAGDPRAEELVQQALELVRKAVESTDELRIRQLLLLVLFILNRAKELLLS

SEQ ID NO: 92 - protein, 196 aa, synthetic construct
  REGION 1..196: note = Synthetic
DELLELLQELLERIRRSTDEEERELLLIALEAIFLAIRILRLAKEMGSPEAQQLAEMALELVRRIKESTDEEEVKLLFIAIQAILLAVKILKLAKEMGSPEAQQLAEMALELVRRIKESTDEEEVKLLFIAIQAILLAVKILKLAKEMGSPEAQQLAEMALELVRRIKESTDEHEVQKLFFEILHILSLVLELKQS

SEQ ID NO: 93 - protein, 210 aa, synthetic construct
  REGION 1..210: note = Synthetic
DELRELLQEIKAIAIQIRAQAQQTGNMELAELAQEMVRRAKEATDEEELKLLLLVVQIILIAAKIFKTARETGNMELAELAQEMVRRAKEATDEEELKLLLLVVQIILIAAKIFKTARETGNMELAELAQEMVRRAKEATDEEELKLLLLVVQIILIAAKIFKTARETGNMELAELAQEMVRRAKEATDERELFHLLLIVLRILQEARRS

SEQ ID NO: 94 - protein, 210 aa, synthetic construct
  REGION 1..210: note = Synthetic
DRLEILLAEIILIANRIRELAKETGNMELAELAQEMVRRAKEATDEEELKLLLLVVQIILIAAKIFKTARETGNMELAELAQEMVRRAKEATDEEELKLLLLVVQIILIAAKIFKTARETGNMELAELAQEMVRRAKEATDEEELKLLLLVVQIILIAAKIFKTARETGNMELAELAQEMVRRAKEATDEDELRELLLQVLQILVRAEHS

SEQ ID NO: 95 - protein, 210 aa, synthetic construct
  REGION 1..210: note = Synthetic
SELEQLVLQAHSIVFQIRTLAQKAGSMELSELAVELAQRAHNSTDEEELRLLLLVVEAIFIVLQIIVLAKKAGSMELMELAVELAQRAHNSTDEEELRLLLLVVEAIHIVLQIIVLAKKAGSMELMELAVELAQRAHNSTDEEELRLLLLVVEAIHIVLQIIVLAKKAGSMELMELAVELAQRAHNSTDEEELRKLLLRVLVILLLLRIS

SEQ ID NO: 96 - protein, 210 aa, synthetic construct
  REGION 1..210: note = Synthetic
DEEEELVTEAQLIVLRIRQLAKKAGSMELMELAVELAQRAHNSTDEEELRLLLLVVEAIHIVLQIIVLAKKAGSMELMELAVELAQRAHNSTDEEELRLLLLVVEAIHIVLQIIVLAKKAGSMELMELAVELAQRAHNSTDEEELRLLLLVVEAIHIVLQIIVLAKKAGSMELMELAVELAQRAHNSTDERELRELLILVKTILIQLRIL

SEQ ID NO: 97 - protein, 210 aa, synthetic construct
  REGION 1..210: note = Synthetic
DELEELILKAKLIVTRIRHLAKKAGSMELMELAVELAQRAHNSTDEEELRLLLLVVEAIHIVLQIIVLAKKAGSMELMELAVELAQRAHNSTDEEELRLLLLVVEAIHIVLQIIVLAKKAGSMELMELAVELAQRAHNSTDEEELRLLLLVVEAIHIVLQIIVLAKKAGSMELMELAVELAQRAHNSTDEIELKELLQLVELIFDKLKRI

SEQ ID NO: 98 - protein, 241 aa, synthetic construct
  REGION 1..241: note = Synthetic
DKLERLVLRAEEIATRIRILAFEIKRRTGDPKAEELAENATEMVRRVKNSTDEEELKLLLLVVLAILIAALILLLASQIKQQTGDPKAEELAENATEMVRRVKNSTDEEELKLLLLVVLAILIAALILLLASQIKQQTGDPKAEELAENATEMVRRVKNSTDEEELKLLLLVVLAILIAALILLLASQIKQQTGDPKAEELAENATEMVRRVKNSTDEEELKRLLRRVRQILVDAESLLLH

SEQ ID NO: 99 - protein, 249 aa, synthetic construct
  REGION 1..249: note = Synthetic
DEKEELKTEIYRLENQLRILIKQLKRANDPEVRESIEQAKQLIQEAIELVRSGDEKDIRLALLLMQIAYLLLELVRLIEELKRANDPEVRESIEQAKQLIQEAIELVRSGDEKDIRLALLLMQIAYLLLELVRLIEELKRANDPEVRESIEQAKQLIQEAIELVRSGDEKDIRLALLLMQIAYLLLELVRLIEELKRANDPEVREAIEKAKRTIQEAIELVRSGDEKDIRKALRLMKAAELLLRAVHYL

SEQ ID NO: 100 - protein, 249 aa, synthetic construct
  REGION 1..249: note = Synthetic
DRLEELETEIRELKVRLETLIRQLKRANDPEVRESIEQAKQLIQEAIELVRSGDEKDIRLALLLMQIAYLLLELVRLIEELKRANDPEVRESIEQAKQLIQEAIELVRSGDEKDIRLALLLMQIAYLLLELVRLIEELKRANDPEVRESIEQAKQLIQEAIELVRSGDEKDIRLALLLMQIAYLLLELVRLIEELKRANDPEVRESIEEAKQIIQEAIELVRSGDEKDIRLALKLMKLAFTLLQFVLLS

SEQ ID NO: 101 - protein, 222 aa, synthetic construct
  REGION 1..222: note = Synthetic
SRLEQIMFEARLLVELAFQAAKYAGDPKLLEIVQRILEHLIEALQAGDEEQIRLAYIMASAVYLVVRAFILAKQAGDPKLLEIVQRILEHLIEALQAGDEEQIRLAYIMASAVLLVVLAFILAKRAGDPKLLEIVQRILEHLIEALQAGDEEQIRLAFLMARAVLLVVLAFILAKRAGDPKLLEIVQRILEHLIEALQAGDERQIIEALILAYEVLVRVRTS

SEQ ID NO: 102 - protein, 249 aa, synthetic construct
  REGION 1..249: note = Synthetic
DELEELVQRVRLLAQQILENAKEAGDEELSRSAKEIIRQAIQLLELSKQGNKEEMKEQLELLLLVLKVILLALEILTYAEEEGDEELSRSAKEIIRQAIQLLELSKQGNKEEMKEQLELLLLVLKVILLAIEILKRAKEAGDEELSRSAKEIIRQAIQLLELSKQGNKREMRHELLLLLLVLLVILLAIEILQRAKEAGDEELSRSAKEIIRQAIQLLELSKQGNREEMFEQLLRLLLELLRILLRILS

SEQ ID NO: 103 - protein, 250 aa, synthetic construct
  REGION 1..250: note = Synthetic
DKFRELIREVLELVVRIEVTAHFQGAEEFQETARQIREEALQALELYKQGNKEEALRILKFLLMILKVILLVLRILEIAARQGAEEFQETARQIFEEALQALELWKQGNKEEALRILKFLLMILKVILLVLRILEIAAKQGAEEFQETARQIFEEALQALELWKQGNKEEALRILKFLLMILKVILLVLRILEIAAKQGAEEFQETARQIFEEALQALELWKQGNKEEALRILKFLLMILHHILTQLESL

SEQ ID NO: 104 - protein, 250 aa, synthetic construct
  REGION 1..250: note = Synthetic
DKFEEMIQKVLRLVAQILSLAHHQGAEEFQETARQIEEEARQAEELWKQGNKEEALRILKFLLMILKVILLVLLILQIAARQGAEEFQETARQIFEEALQALELWKQGNKEEALRILKFLLMILKVILLVLRILEIAAKQGAEEFQETARQIFEEALQALELWKQGNKEEALRILKFLLMILKVILLVLRILEIAAKQGAEEFQETARQIFEEALQALELWKQGNKEEALRILRRLLLLLLQILNELEFL

SEQ ID NO: 105 - protein, 250 aa, synthetic construct
  REGION 1..250: note = Synthetic
DEFELMILEVRTLVYFIEHFAALQGAEEFQETARQIFEEALQALELWKQGNKEEALRILKFLLMILKVIILVLRILIIARNQGAEEFQETARQIFEEALQALELWKQGNKEEAERILYFLLIILKVILLVLRILEIAAKQGAEEFQETARQIFEEALQALELWKQGNREEALEILLFLLFILKVILLVLRILEIAAKQGAEEFQETARQIFEEALQALELWKQGNKEEALRILAELLVLLHRILNQLIVL

SEQ ID NO: 106 - protein, 250 aa, synthetic construct
  REGION 1..250: note = Synthetic
DKFEEMIIEVNALVAYIETLAHLQGAEEFQETARQIKEEAEQALELFRQGNKEEALRILKFLLMILKVIILVLRILHIAAQQGAEEFQETARQIFEEALQALELWKQGNKEEALRILKFLLMILKVILLVLRILEIAAKQGAEEFQETARQIFEEALQALELWKQGNKEEALRILKFLLMILKVILLVLRILEIAAKQGAEEFQETARQIFEEALQALELWKQGNKEEALRILRRLLLLLLQILLELEYL

SEQ ID NO: 107 - protein, 250 aa, synthetic construct
  REGION 1..250: note = Synthetic
SKFEEMILEVQLLVYLILIIAARQGAEEFQETARQIFEEALQALELWKQGNKEEALRILKFLLMILKVILLVLEILHIAHEQGAEEFQETARQIFEEALQALELWKQGNKEEALRILKFLLMILKVILLVLRILEIAAKQGAEEFQETARQIFEEALQALELWKQGNKEEALRILRFLLLILKVILLVLRILEIAAKQGAEEFQETARQIFEEALQALELWKQGNKEEALKILIRLLSILLEILLKLEDL

SEQ ID NO: 108 - protein, 249 aa, synthetic construct
  REGION 1..249: note = Synthetic
SELEELHSLAFLNLTRLELIFRILGSEEARRVIQSARELLQKALQLQRTGDFEKIKELVELIELFARALEMLKRLQEIYEKTGSEEARRVIQSARELLQKALQLQRTGDFEKIKELVELIELFARALEMLERLQEIYEKTGSEEARRVIQSARELLQKALQLQRTGDFEKIKELVELIELFARALEMLERLQEIYEKTGSEEARRLIQLARENLQRALQYQRTGDHEQIRALVLRIEALAITLEANLIS

SEQ ID NO: 109 - protein, 235 aa, synthetic construct
  REGION 1..235: note = Synthetic
DEIIHEALLWASDLYLVALFMGDPKLQESAERMLQQLEENLRAGDIEELLKTAREVIIIVRALLWAAQLYRYAKEMGDPKLLESAERMIQQLFENLQAGDIEELLKTAREVIIIVRALLWAAQLYKYAKEMGDPKLLESAERMIQQLFENLQAGDIEELLKTAREVIIIVRALLWAAQLYKYAKEMGDPKLLESAERMIQQLFENLQAGDIEELLKTAREVIHRVFRLLNEARLS

SEQ ID NO: 110 - protein, 235 aa, synthetic construct
  REGION 1..235: note = Synthetic
DYETQQARTLARLLFLIAKEMGDPKLLESAERMIQQLFENLQAGDIEELLKTAREVIIIVRALLWAAQLYKYAKEMGDPKLLESAERMIQQLFENLQAGDIEELRYTALLVIIIVRALLWAAQLYKYAKEMGDPKLLESAERMIQQLFENLQAGDEEELLRTAFRVIVIVIALLWAAQLYKYAKEMGDPKLLESAERMIQQLFENLQAGDEEELLRLAVEVIAHVFILLLRAQRS

SEQ ID NO: 111 - protein, 277 aa, synthetic construct
  REGION 1..277: note = Synthetic
DELIIEILELALRAYLIMRRLLRIVKERGDERLETFERLLESIIRTIEEAKELYEAGMTEELKQVLLIVKILLLAAQAILIMLELLQIVKERGDERLETFERLLESIIRTIKEAIELWEAGMTEELKQVLLIVKILLLAAQAILIMLELLQIVKERGDERLETFERLLESIIRTIKEAIELWEAGMTEELKQVLLIVKILLLAAQAILIMLELLQIVKERGDERLETFERLLESIIRTIKEAIELWEAGMTEELKKVLRRVRNLLELAEVLLSHLEN

SEQ ID NO: 112 - protein, 251 aa, synthetic construct
  REGION 1..251: note = Synthetic
DIEFEVLALRARANVLEAELIAREAGNPELLELVRLIVQFLKEALETFKQGDFEKAWRLLQFAFIAASAILLVVLAFQIAKEAGNPELLELVRLIVQFLKEALETFKQGDFEKAWRLLQFAYIAASAILLVVLAFQIAKEAGNPELLELVRLIVQFLKEALETFKQGDFEKAWRLLEFAYLAASAILLVVLAFQIAKEAGNPELLELVRLIVQFLKEALETFKQGDREKAYRLLLRAYVEAYFILLLVENS

SEQ ID NO: 113 - protein, 155 aa, synthetic construct
  REGION 1..155: note = Synthetic
DEERQRAEQLVLLLEHVYKYLGDSTFQELARRLLEVLKRGDDEQIRRMSEQAQAAYLVFELHLVYRRLGDSTFQELARRLLEVLKRGDDEQIRRMSFQAKAALLVFLLFEVYKYLGDSTFQELARRLLEVLKRGDDEQIKHMYILALEALLKFES

SEQ ID NO: 114 - protein, 177 aa, synthetic construct
  REGION 1..177: note = Synthetic
DELEVEARSLAELLQILYEKLKRGLDEETLEIIQRLVQFILEVVKTGDKELIKKAILMAQAALLAIELQRLYEELKRGLDEETLEIIQRLVQFILEVVKTGDKELIKKAILMAQAAILAIELQRLYEELKRGLDEETLEIIQRLVQFILEVVKTGDRRLILHAINLAIEALFEIEQS

SEQ ID NO: 115 - protein, 205 aa, synthetic construct
  REGION 1..205: note = Synthetic
DELQQLLAEAYYIILLVEEAGDPELIRLAKELTQLIKEAVENGDWWLARLVLLVLLAIEIILKVQEAGDPELIRLAKELMQLIKEATENGDWWLARLVLLVLLAISIILQVQEAGDPELIRLAKELMQLIKEATENGDWWLAHLVLLVLLAISIILQVQEAGDPELIRLAKELMQLIKEATENGDDKLAFRVLLQLLVIRLQLEH

SEQ ID NO: 116 - protein, 222 aa, synthetic construct
  REGION 1..222: note = Synthetic
DELEELILRAELLIHQAELLARELGDQEFMEVAREVMEFLLQALREGDMELVKLIYLIASALLLILKAIQLAKQLGDQEFMEVAREVMEFLLQALREGDMELVKLIYLIASALLLILKAIQLAKQLGDQEFMEVAREVMEFLLQALREGDMELVKLIYLIASALLLILKAIQLAKQLGDQEFMEVAREVMEFLLQALREGDMELVKKIYHIALILLLELRLS

SEQ ID NO: 117 - protein, 222 aa, synthetic construct
  REGION 1..222: note = Synthetic
DELESLITRALALIKFAKTLAEYLGDQEFMEVAREVEEFLLQALREGDMELVKLIYLIASALVLILLAIITALELGDQEFMEVAREVMEFLLQALREGDMELVKLIYLIASALLLILKAIQLAKQLGDQEFMEVAREVMEFLLQALREGDMELVRLIYHIASALLLILKAIQLAKQLGDQEFMEVAREVMEFLLQALREGDRRLVYQILSFAFHLLLELEQS

SEQ ID NO: 118 - protein, 222 aa, synthetic construct
  REGION 1..222: note = Synthetic
SELEHLIILAQVYILSALLLARHLGDQEFMEVAREVMEFLLQALREGDMELVKLIYLIASALLLILLAILLAHLLGDQEFMEVAREVMEFLLQALREGDMELVKLIYLIASALLLILKAIRLAKKLGDQEFMEVAREVMEFLLQALREGDERLVLLIYHIASALLLILKAIQLAKQLGDQEFMEVAREVMEFLLQALREGDLKLVLRILLIARELLLELREI

SEQ ID NO: 119 - protein, 255 aa, synthetic construct
  REGION 1..255: note = Synthetic
SLEIHTIALQVRSFALQAEKVVKEAGLPPSYKELLRLIIELIKQALELAQQGNWEEAILMARIALLAAKVIYFAVLAWSIVKEAGLPPSYKELLRLIIELIKQALELAQQGNWEEAILMARIALLAAKVIWFAVLAWSIVKEAGLPPSYKELLRLIIELIKQALELAQQGNWREAILMARIALLAAKVIWFAVLAWSIVKEAGLPPSYKELLRLIIELIKQALELAQQGNHEEALRLAYEALVLAELIWEKVLAW

SEQ ID NO: 120 - protein, 242 aa, synthetic construct
  REGION 1..242: note = Synthetic
LEELEHIANLIRVLLKRAETLAGSDSEIIEAVRKVIELILEATRLFQAGDDEEARKLFQLALIMAKIVLLLAEAIRIAGSDSEIIEAVRKVIELILEATRLFQAGDDEEARKLFELALIMAKIVYLLAQAIKIAGSDSEIIEAVRKVIELILEATRLFQAGDQREAFLLFYLALIMAKIVYLLAQAIKIAGSDSEIIEAVRKVIELILEATRLFQAGDQEEALRLFLEAYAHALRVYLEALS

SEQ ID NO: 121 - protein, 242 aa, synthetic construct
  REGION 1..242: note = Synthetic
LRELEILREFIENILKIAEQLAGSDSEIIEAVRKVIELILEATRLFQAGDDEEARKLFQLALIMAKIVFLLAEAIHIAGSDSEIIEAVRKVIELILEATRLFQAGDDEEAEKLFQLALIMAKIVYLLAQAIKIAGSDSEIIEAVRKVIELILEATRLFQAGDRERAIRLFALAYIMALIVYFLALAIRNAGSDSEIIEAVRKVIELILEATRLFQAGDEEEALELFLHALSLAFEVYVQAVS

SEQ ID NO: 122 - protein, 194 aa, synthetic construct
  REGION 1..194: note = Synthetic
DELEVLVDLAHVAVRHAEKAGVDPKALELVIRIVIEALQRGDLELAQLALTVARALFIVILAERAGVDPKALELVIRIVIEALQRGDLELAELALTVARALLMVIKAEEAGVDPKALELVIRIVIEALQRGDQDLALLALYVARALLMVIKAEEAGVDPKALELVIRIVIEALQRGDLELAFRALALAIRLLNS

SEQ ID NO: 123 - protein, 250 aa, synthetic construct
  REGION 1..250: note = Synthetic
DEFELEARQVEYLVHEAEVIARKAGNDELLEAVRIILQLLIEALRTFKQGDEEKAQQLLEFVLQAALVVLLVALAYLIAKEAGNDELLEAVRIILQLLIEALRTFKQGDEEKAQQLLEFVLQAALVVLLVALAYLIAKEAGNDELLEAVRIILQLLIEALRTFKQGDEEKAQQLLHFVLLAAQVVLLVALAYLIAKEAGNDELLEAVRIILQLLIEALRTFKQGDEEKAHELLLRVLSLAYEVLLRALEY

SEQ ID NO: 124 - protein, 210 aa, synthetic construct
  REGION 1..210: note = Synthetic
DRKEHYKLFALHVVLVARINGAGVETAEELLQRLLEAIKEGDWEKIQEIYRLLKYLLHALQVVKTARENGAGVETAEELLQRLLEAIKEGDWEKIQEIYRLLKYLLHALQVVKTARENGAGVETAEELLQRLLEAIKEGDWKKIQRIYLLLRFLLHALQVVKTARENGAGVETAEELLQRLLEAIKEGDKEKILHIFELLYRLLFELESS

SEQ ID NO: 125 - protein, 210 aa, synthetic construct
  REGION 1..210: note = Synthetic
DELEEYEQFARRVVRTARENGAGVETAEELLQRLLEAIKEGDWEKIQEIYRLLKYLLHALQVVKTARENGAGVETAEELLQRLLEAIKEGDWEKIQEIYRLLKYLLHALQVVKTARENGAGVETAEELLQRLLEAIKEGDWEKIKHIYLLLEFLLFALQVVKTARENGAGVETAEELLQRLLEAIKEGDEEKIIKIFVLLTELLLRLRNS

SEQ ID NO: 126 - protein, 203 aa, synthetic construct
  REGION 1..203: note = Synthetic
DEEEELRIELLRLVHRLKRLIQRLKELGDPELAEFLKKIIEEILRAIQTSQNGNLEEAKRLAQEVKLMFELAELVYRLFELIQRLKELGDPELAEFLKKIIEEILRAIQTSQNGNLEEAKRLAQEVKLMFELAELVYRLFELIQRLKELGDPELAEFLKKIIEEILRAIQTSQNGNLEEARHLALEVKILFTRAELLYQRFES

SEQ ID NO: 127 - protein, 222 aa, synthetic construct
  REGION 1..222: note = Synthetic
DEIRLIAFEFLIRLKELAKRARDDPELYELIKQVFELFTEAAKTGDEELLRKAQLMYRAVEHLIRLQELAKRARDDPELYELIKQVFELFTEAAKTGDEELLRKAQLMYRAVEHLIRLQELAKRARDDPELYELIKQVFELFTEAAKTGDEELLRKAQLMYRAVEHLIRLQELAKRARDDPELYELIKQVFELFTEAAKTGDERLLEYAELLFRLVELQIEL

SEQ ID NO: 128 - protein, 261 aa, synthetic construct
  REGION 1..261: note = Synthetic
DQEDELYQRLSHLLAQLLELLLEIRHQGDLELLELAQQAFELASRAAKTAEQGDLERALELYQTVLLIFELVRLMLELLELQEQIKKQGDLELLELAQQAFELASRAAKTARQGDLERALELYQTVLLIFELVRLMLELLELQEQIKKQGDLELLELAQQAFELASRAAKTARQGDLERALELYQTVLLIFELVRLMLELLELQEQIKKQGDLQLLELAQQAFELASRAAKTARQGDLERALELYEHVQIIFEIVRLQLEL

SEQ ID NO: 129 - protein, 261 aa, synthetic construct
  REGION 1..261: note = Synthetic
DQEDELIKKLLRLLALLLELQIDIKRQGDLELLELAQQAFELASRAAKTAKQGDLERALELYQTVLLIFELVRLMLELLELQEQIKKQGDLELLELAQQAFELASRAAKTARQGDLERALELYQTVLLIFELVRLMLELLELQEQIKKQGDLELLELAQQAFELASRAAKTARQGDLERALELYQTVLLIFELVRLMLELLELQEQIKKQGDLELLELAQQAFELASRAAKTARQGDLRRAERIYQEVRLIFEYVRLELER

SEQ ID NO: 130 - protein, 227 aa, synthetic construct
  REGION 1..227: note = Synthetic
SELEIEALRLAYELEEQAKRAAAKDPRQFELARQIVEKLREMVRRGDEEQIRKLSLLVKAILLAIELLEQAERAAAKDPRQFELARQIVEKLLEMVQRGDEEQIRKLSLLVKAILLAIELLEQAERAAAKDPRQFELARQIVEKLLEMVQRGDEEQIRKLSLLVKAILLAIELLEQAERAAAKDPRLFELARRIVEELLEAVQRGDETLIETLSRIVEVILQSIERL

SEQ ID NO: 131 - protein, 227 aa, synthetic construct
  REGION 1..227: note = Synthetic
LSLLRKALELAARLYTLAEEAAKKDPRQFELARQIVEKLKEMVERGDEEQIRKLSLLVKAILLAIELLEQAERAAAKDPRQFELARQIVEKLLEMVQRGDEEQIRKLSLLVKAILLAIELLEQAERAAAKDPRQFELARQIVEKLLEMVQRGDEEQIRKLSLLVKAILLAIELLEQAERAAAKDPRLFEKARQIVEKLLEMVQRGDERQIRELSYQVRVILLLIEDS

SEQ ID NO: 132 - protein, 222 aa, synthetic construct
  REGION 1..222: note = Synthetic
DERELIENEAESLARVAHSVAKRQGNDELLEAVQELLRSIIEAIQRGDEKKIRIILLLAQAVYLAVQAFRMAKEQGNDELLEAVQELLRSIIEAIQRGDEKKIKIILLLAQAVYLAVSAFTMAKEQGNDELLEAVQELLRSIIEAIQRGDDHLIFIILLLARAVYLAVSAFTMAKEQGNDELLEAVQELLRSIIEAIQRGDDELIFEILARALLVYLRVRLH

SEQ ID NO: 133 - protein, 222 aa, synthetic construct
  REGION 1..222: note = Synthetic
DEIEHISLEARILVLLAHTLARHAGDPKLLEIVQRILEHLIEALQAGDEEQIRLAYIMASAVLLVVRAFILAKRAGDPKLLEIVQRILEHLIEALQAGDEEQIRLAYIMASAVLLVVLAFILAKRAGDPKLLEIVQRILEHLIEALQAGDEEQIRLAYLMASAVLLVVLAFILAKRAGDPKLLEIVQRILEHLIEALQAGDEQQIAHAYILALHVLLQVRLF

SEQ ID NO: 134 - protein, 250 aa, synthetic construct
  REGION 1..250: note = Synthetic
DEFELLAERVKHLVKTAETIARKAGNDELLEAVRIILQLLIEALRTFKQGDEEKAQQLLEFVLQAALVVLLVALAYLIAKEAGNDELLEAVRIILQLLIEALRTFKQGDEEKAQQLLHFVLLAALVVLLVALAYLIAKEAGNDELLEAVRIILQLLIEALRTFKQGDERKAEELLFFVLLAALVVLLVALAYLIAKEAGNDELLEAVRIILQLLIEALRTFKQGDEEKALHLLAHVLVKALHVLEQARRY

SEQ ID NO: 135 - protein, 235 aa, synthetic construct
  REGION 1..235: note = Synthetic
REEIINEALKLVLLVKLLARELSKKDEEKARQMFETAQELAERVKKSTDEEELKRLLIILQAIFLVLKVLKLAEELSRKDEEKARQMFETAQELAERVQKSTDEEELKRLLIILQAIYLVLKVLKLAEELSRKDEEKARQMFETAQELAERVQKSTDEEELERLLIILQAIYLVLKVLKLAEELSRKDEEKARQMFETAQELAERVQKSTDQQELTRLLFILQTILRELEILKRS

SEQ ID NO: 136 - protein, 222 aa, synthetic construct
  REGION 1..222: note = Synthetic
DRLEFIADRARTLVESAHYIAERAGDPKLLEIVQRILEHLIEALQAGDEEQIRLAYIMASAVLLVVLAFILAVLAGDPKLLEIVQRILEHLIEALQAGDERQIRLAYIMASAVLLVVLAFILAKEAGDPKLLEIVQRILEHLIEALQAGDLHLILLAYIMALAVLLVVLAFILAKRAGDPKLLEIVQRILEHLIEALQAGDHEQIYQALKLALQVLNLVLES

SEQ ID NO: 137 - protein, 222 aa, synthetic construct
  REGION 1..222: note = Synthetic
DRLEEIALEAEYLVRLAHHFAEQAGDPKLLEIVQRILEHLIEALQAGDEEQIRLAYIMASAVLLVVRAFILAKRAGDPKLLEIVQRILEHLIEALQAGDEEQIRLAYIMASAVLLVVLAFILAKRAGDPKLLEIVQRILEHLIEALQAGDEHQIDLAYTMALAVLLVVLAFILAKRAGDPKLLEIVQRILEHLIEALQAGDERQIIHALALALEVLNLVRNF

SEQ ID NO: 138 - protein, 251 aa, synthetic construct
  REGION 1..251: note = Synthetic
DEEFRLLALQAEYLVLEARQIAEEAGNPELLELVRLIVQFLKEALETFKQGDFEKAWRLLQFAYIAASAILLVVLAFQIAKEAGNPELLELVRLIVQFLKEALETFKQGDFEKAWRLLQFAYIAASAILLVVLAFQIAKEAGNPELLELVRLIVQFLKEALETFKQGDFEKAWRLLQFAYIAASAILLVVLAFQIAKEAGNPELLELVRLIVQFLKEALETFKQGDFEKAHKLLLEAYILALYILLLVRLS

SEQ ID NO: 139 - protein, 251 aa, synthetic construct
  REGION 1..251: note = Synthetic
LRQFEKLATRAEALVFSAKLIAEFAGNPELLELVRLIVQFLKEALETFKQGDFEKAWRLLQFAYIAASAIYLVVRAFLIAKEAGNPELLELVRLIVQFLKEALETFKQGDFEKAWRLLQFAYIAASAILLVVLAFQIAKEAGNPELLELVRLIVQFLKEALETFKQGDFEKAWRLLQFAYIAASAILFVVLAFQIAKEAGNPELLELVRLIVQFLKEALETFKQGDFEKAWRLLHEAFIRALEILTRVRRH

SEQ ID NO: 140 - protein, 251 aa, synthetic construct
  REGION 1..251: note = Synthetic
LREFEFLAIQARANVLAAEHLARFAGNPELLELVRLIVQFLKEALETFKQGDFEKAWRLLQFAYIAASAIFLVVQAFLNALLAGNPELLELVRLIVQFLKEALETFKQGDFEKAWELLEFAYVAASAILLVVLAFIIAKKAGNPELLELVRLIVQFLKEALETFKQGDRERAFSLLYFAHLAALAILLVVLAFQIAKEAGNPELLELVRLIVQFLKEALETFKQGDEEKALQLLLRAFILAYEILLRVRLS

SEQ ID NO: 141 - protein, 251 aa, synthetic construct
  REGION 1..251: note = Synthetic
LEEFEFIARHARALVLSAEHLARDAGNPELLELVRLIVQFLKEALETFKQGDFEKAWRLLQFAYIAASAILLVVSAFLVAQLAGNPELLELVRLIVQFLKEALETFKQGDFEKAWRLLQFAYIAASAILLVVLAFLIAKRAGNPELLELVRLIVQFLKEALETFKQGDFEKAWRLLRFAYFAASAILLVVLAFQIAKEAGNPELLELVRLIVQFLKEALETFKQGDFEKAHRLLREAYILALRILIEVEDF

SEQ ID NO: 142 - protein, 250 aa, synthetic construct
  REGION 1..250: note = Synthetic
DEFREEALEVELLVLRAHHIAKRAGNDELLEAVRIILQLLIEALRTFKQGDEEKAQQLLEFVLQAALVVLLVALAYLIAKEAGNDELLEAVRIILQLLIEALRTFKQGDEEKAQQLLEFVLQAALVVLLVALAYLIAKEAGNDELLEAVRIILQLLIEALRTFKQGDEEKAQQLLEFVLQAALVVLLVALAYLIAKEAGNDELLEAVRIILQLLIEALRTFKQGDEEKAQQLLRHVLTLAEQVLTEAKAH

SEQ ID NO: 143 - protein, 250 aa, synthetic construct
  REGION 1..250: note = Synthetic
DDFRLEALQVEFLVLRAELIAKRAGNDELLEAVRIILQLLIEALRTFKQGDEEKAQQLLEFVLQAALVVLLVALAYLIAKEAGNDELLEAVRIILQLLIEALRTFKQGDEEKAQQLLEFVLQAALVVLLVALAYLIAKEAGNDELLEAVRIILQLLIEALRTFKQGDEEKAQQLLEFVLQAALVVLLVALAYLIAKEAGNDELLEAVRIILQLLIEALRTFKQGDEEKAQQLLEFVLQAAEQVLQEALRY

SEQ ID NO: 144 - protein, 250 aa, synthetic construct
  REGION 1..250: note = Synthetic
SEFELLAERVKHLVKTAEYIARKAGNDELLEAVRIILQLLIEALRTFKQGDEEKAQQLLEFVLQAALVVLLVALAYLIAKEAGNDELLEAVRIILQLLIEALRTFKQGDEEKAQQLLHFVLNAALVVLLVALAYLIAKEAGNDELLEAVRIILQLLIEALRTFKQGDEEKAFELLFFVLLAALVVLLVALAYLIAKEAGNDELLEAVRIILQLLIEALRTFKQGDEEKALQLLARVLVKALLVLERARRY

SEQ ID NO: 145 - protein, 250 aa, synthetic construct
  REGION 1..250: note = Synthetic
SDFEYQAIQVHLLVYRAELVARLAGNDELLEAVRIILQLLIEALRTFKQGDEEKAQQLLEFVLQAALVVLLVAEAYFTALRAGNDELLEAVRIILQLLIEALRTFKQGDEEKAQQLLEFVLQAALVVLLVALAYLIAKEAGNDELLEAVRIILQLLIEALRTFKQGDEEKAQQLLKFVLYAAEVVLIVALAYLIAKEAGNDELLEAVRIILQLLIEALRTFKQGDEEKARQLLREVLTLAFHVLLLARDY

SEQ ID NO: 146 - protein, 250 aa, synthetic construct
  REGION 1..250: note = Synthetic
DEFEVRAIQVEALVRSAEIIARNAGNDELLEAVRIILQLLIEALRTFKQGDEEKAQQLLEFVLQAALVVLLVALAYLNAQLAGNDELLEAVRIILQLLIEALRTFKQGDEEKAQQLLRFVLLAALVVLLVALAYLIAREAGNDELLEAVRIILQLLIEALRTFKQGDERKAFHLLQFVLLAAFVVLLVALAYLEAKEAGNDELLEAVRIILQLLIEALRTFKQGDEEKARQLLRHVYLLATEVLLRAQES

SEQ ID NO: 147 - protein, 221 aa, synthetic construct
  REGION 1..221: note = Synthetic
DEIAIEAESIAHSAELYARLAGNEELLELVRLIVETLIEAIKTGDEKQIRFALIAVEAVLLAVRAYRNAQKAGNEELLELVRLIVETLIEAIKTGDEKQIRFALIAVEAVLLAVLAYLMAQQAGNEELLELVRLIVETLIEAIKTGDEKQIEFAHIAVEAVLVAVLAYLMAQQAGNEELLELVRLIVETLIEAIKTGDEKQIKEALRLVLEVLVKVEIFLR

SEQ ID NO: 148 - protein, 221 aa, synthetic construct
  REGION 1..221: note = Synthetic
DEIARRARILARQARVTAETAGNEELLELVRLIVETLIEAIKTGDEKQIRFALIAVEAVLLAVLAYFEAQLAGNEELLELVRLIVETLIEAIKTGDEKQIRFALIAVEAVLLAVLAYLMAQQAGNEELLELVRLIVETLIEAIKTGDEKQIHFAYIAVEAVLVAVLAYLMAQQAGNEELLELVRLIVETLIEAIKTGDEKQIRHAFELVFRVLTEVLSFLQ

SEQ ID NO: 149 - protein, 222 aa, synthetic construct
  REGION 1..222: note = Synthetic
DELEYLMLRAEDLAKQARYNAEIAGNPLLLEVVRTIIERILEALQEGDEEQIRLALLMARAVLLAAEAYLLAKKAGNPLLLEVVRTIIERILEALQEGDEEQIRLALLMARAVLLAALAYELAKKAGNPLLLEVVRTIIERILEALQEGDERQIYLALLMALAVLLAALAYELAKKAGNPLLLEVVRTIIERILEALQEGDEEQIIEALSRAFHVLIKAEIS

SEQ ID NO: 150 - protein, 222 aa, synthetic construct
  REGION 1..222: note = Synthetic
DQLEFLMNQAKALAYEAELIARLAGNPLLLEVVRTIIERILEALQEGDEEQIRLALLMARAVLLAARAYFIALQAGNPLLLEVVRTIIERILEALQEGDEEQIRLALLMARAVLLAALAYELAKKAGNPLLLEVVRTIIERILEALQEGDEEQIRLALLMARAVLLAALAYELAKKAGNPLLLEVVRTIIERILEALQEGDEEQIRRALHLAQEVLVRARTS

SEQ ID NO: 151 - protein, 222 aa, synthetic construct
  REGION 1..222: note = Synthetic
DELEKLMQRAEHLAFEAELIARKAGNPLLLEVVRTIIERILEALQEGDEEQIRLALLMARAVLLAALAYELAKKAGNPLLLEVVRTIIERILEALQEGDEEQIRLALLMARAVLLAALAYELAKKAGNPLLLEVVRTIIERILEALQEGDEEQIRLALLMARAVLLAALAYELAKKAGNPLLLEVVRTIIERILEALQEGDERQIKEALILALHVLTRAELS

SEQ ID NO: 152 - protein, 219 aa, synthetic construct
  REGION 1..219: note = Synthetic
DTEALQALFLVLEAHRLAKEAGDPKLLEMARLVLETLIEVLQRGDEEKLQFILLAARAVFLVAEAYILAKEAGDPKLLEMARLVLETLIEVLQRGDEEKLQFILLAARAVFLVAEAYILAKEAGDPKLLEMARLVLETLIEVLQRGDEEKLQFILLAARAVFLVAEAYILAKEAGDPKLLEMARLVLETLIEVLQRGDEKKLHHILTLAHYVLVEARLS

SEQ ID NO: 153 - protein, 219 aa, synthetic construct
  REGION 1..219: note = Synthetic
IRLALEAEVLVLQAHLLAHLAGDPKLLEMARLVLETLIEVLQRGDEEKLQFILLAARAVYLVALAYVLAYEAGDPKLLEMARLVLETLIEVLQRGDEEKLQFILLAARAVFLVAEAYILAKEAGDPKLLEMARLVLETLIEVLQRGDHEKLQFILYAALAVFLVAEAYILAKEAGDPKLLEMARLVLETLIEVLQRGDLEKLLQILALAVLVYLKAEKY

SEQ ID NO: 154 - protein, 242 aa, synthetic construct
  REGION 1..242: note = Synthetic
DEFEHIAEEAEVFVKYASEVAGTDPKLQEMVQLILEELIEAIKTFQQGDQEEALKLLRFVLTAAEAVVLVARASRTAGTDPKLQEMVQLILEELIEAIKTFQQGDQEEAERLLKFVLTAALAVLLVALASRTAGTDPKLQEMVQLILEELIEAIKTFQQGDQEEARRLLLFVLIAALAVLLVALASRTAGTDPKLQEMVQLILEELIEAIKTFQQGDKERALSLLFEVLILAEEVLDLARRS

SEQ ID NO: 155 - protein, 221 aa, synthetic construct
  REGION 1..221: note = Synthetic
DYESTEAEYYALVAKLLAERAGDPKAVEVVKLVLQRIIEALRAGDEEKIRLILLMARAVWYAARALVLALLAGDPKAVEVVKLVLQRIIEALRAGDEEKIRLILLMARAVWYAAEALILALLAGDPKAVEVVKLVLQRIIEALRAGDEEKIRLILLMARAVWSAAEALLLAKEAGDPKAVEVVKLVLQRIIEALRAGDEEKIRLILRMALEVLHFALRLKN

SEQ ID NO: 156 - protein, 221 aa, synthetic construct
  REGION 1..221: note = Synthetic
DDRRLKAHLHAYIAEEIAKLAGDPKAVEVVKLVLQRIIEALRAGDEEKIRLILLMARAVYYAAQALLLALSAGDPKAVEVVKLVLQRIIEALRAGDEEKIRLILIMARAVWYAAEALLLALEAGDPKAVEVVKLVLQRIIEALRAGDEEKIQLILVMAVAVFSAAEALLLAKEAGDPKAVEVVKLVLQRIIEALRAGDEEKIREILRLALQVLAYAIYLLL

SEQ ID NO: 157 - protein, 250 aa, synthetic construct
  REGION 1..250: note = Synthetic
DEFEEEAVEVDSLVYLARLIAEVAGNDELLEAVRIILQLLIEALRTFKQGDEEKAQQLLEFVLQAALVVLLVAQAYRIARRAGNDELLEAVRIILQLLIEALRTFKQGDEEKAQQLLEFVLQAALVVLLVALAYLIAKEAGNDELLEAVRIILQLLIEALRTFKQGDEEKAQQLLEFVLLAARVVLIVALAYLIAKEAGNDELLEAVRIILQLLIEALRTFKQGDEEKARQLLKEVAEAASRVLTRAELS

SEQ ID NO: 158 - protein, 221 aa, synthetic construct
  REGION 1..221: note = Synthetic
SELDRIYAEILFLAIELHLLARELGDPELMQQVREALKTVIKAYEAGDEETLRLVLIFIQISILAIELWELAKELGDPELMQQVREALKTVIKAFEAGDEETLRLVLIFIQISILAIELWELAKELGDPELMQQVREALKTVIKAFEAGDEETLRLVLIFIQISILAIELWELAKELGDPELMQQVREALKRVIKAFEAGDEETLRRVFLHIEASILQIRA

SEQ ID NO: 159 - protein, 237 aa, synthetic construct
  REGION 1..237: note = Synthetic
DKKLEHFLIEVKHLILLVRYLAKELGDEELWESAQQLLETVERIERDSGEEALRQVKLIYFLAQVLWYIALVLKLAKELGDEELWESAQQLLETVERILRDSGEEALRQVKLIYFLAQVLWYIALVLKLAKELGDEELWESAQQLLETVERILRDSGEEALRQVKLIYFLAQVLWYIALVLKLAKELGDEELWESAQQLLETVERILRDSGEEALRQVKLIYRLARQLFLQAEVNLL

SEQ ID NO: 160 - protein, 237 aa, synthetic construct
  REGION 1..237: note = Synthetic
DQELEEFLLKVELYILLVLVLARHLGDEELWESAQQLLETVERILRDSGEEALRQVKLIYFLAQVLYYIALVLQLAKELGDEELWESAQQLLETVERILRDSGEEALRQVKLIYFLAQVLWYIALVLKLAKELGDEELWESAQQLLETVERILRDSGEEAERQVELIYFLAQVLWFIALVLKLAKELGDEELWESAQQLLETVERILRDSGEEALRQVLRIYSEAIFLFLLAELQKR

SEQ ID NO: 161 - protein, 237 aa, synthetic construct
  REGION 1..237: note = Synthetic
DLELRTLLQLVEVYIRTVLILAKRLGDEELWESAQQLLETVERILRDSGERALLQVKLIYFLAQVLYYIALVLLLAKELGDEELWESAQQLLETVERILRDSGSRALRKVYLIYFLAQVLYYIALVLKLAKELGDEELWESAQQLLETVERILRDSGEEALRKVFLIYLLAQVLWYIALVLLLAKELGDEELWESAQQLLETVERILRDSGEEALRKVVEIFLQAFSLFLEALERLS

SEQ ID NO: 162 - protein, 222 aa, synthetic construct
  REGION 1..222: note = Synthetic
DEIERILIEVISVIVEIKLLARELGDPEIWEQARQLSEVSQQVREEGDKEKAEIILILALVLLIIIRILEDAKRLGDPEIWEQARQLSEVMQQVLEEGDKEKAEIILILALVLLIIIRILKDAKALGDPEIWEQARQLSEVMQQVLEEGDKEKAEIILILALVLLIIIRILKDAKALGDPEIWEQARQLSEVMQQVLEEGDKEKAHRILQEARKLLLEIEYL

SEQ ID NO: 163 - protein, 222 aa, synthetic construct
  REGION 1..222: note = Synthetic
DEIEEILNQVKVVIENILRLAKQLGDPEIWEQARQLSEVMQQVLEEGDKEKAEIILILALVLLIIIKILRDAKALGDPEIWEQARQLSEVMQQVLEEGDKEKAEIILILALVLLIIIRILKDAKALGDPEIWEQARQLSEVMQQVLEEGDKRKAEIILTLALVLLIIIRILKDAKALGDPEIWEQARQLSEVMQQVLEEGDQRKAVRILTEALFLLEEIRIS

SEQ ID NO: 164 - protein, 222 aa, synthetic construct
  REGION 1..222: note = Synthetic
DEVEYILLRVKSVIAAIKTLAKDLGDPEIWEQARQLEEVAQQVLEEGDKEKAEIILILALVLLIIILILFLAELLGDPEIWEQARQLSEVMQQVLEEGDKEKAEIILILALVLLIIIQILFDARHLGDPEIWEQARQLSEVMQQVLEEGDKEKARIILILALVLLIIIRILKDAKALGDPEIWEQARQLSEVMQQVLEEGDLRKAFEILERALHLLNEIELL

SEQ ID NO: 165 - protein, 222 aa, synthetic construct
  REGION 1..222: note = Synthetic
DELELMAIEVRQHLQLAHEFAKRLGDPEYLRSVEEVLELLEQALRNNDEELVKLILMAAQVLVLLIRAWFVALKLGDPEYLRSVEEVLELLEQALRNNDEELVKLILMAAQVLILLIKAWRSAKQLGDPEYLRSVEEVLELLEQALRNNDEELVFLILLAAQVLILLIKAWRSAKQLGDPEYLRSVEEVLELLEQALRNNDLHLVIQIYAHALRLEIDIRKW

SEQ ID NO: 166 - protein, 222 aa, synthetic construct
  REGION 1..222: note = Synthetic
DDLEFLAQEVELLLRFAWEVAKRLGDPEYLRSVEEVLELLEQALRNNDEELVKLILMAAQVLVLLIRAWRSAKQLGDPEYLRSVEEVLELLEQALRNNDEELVKLILMAAQVLILLIKAWRSAKQLGDPEYLRSVEEVLELLEQALRNNDEHLVKLILYAAQVLILLIKAWRSAKQLGDPEYLRSVEEVLELLEQALRNNDFELVVRILAQADKLIELIKRW

SEQ ID NO: 167 - protein, 222 aa, synthetic construct
  REGION 1..222: note = Synthetic
DSIERLAVEIEAIIHFVVYFARKLGDPKMLELAQELLELVRQALELGDEEKASIILLAVQILYYIILVVILARRLGDPKMLELAQELLELVRQALELGDEEKASIILLAVQILYYIILVVKFARELGDPKMLELAQELLELVRQALELGDEHKAKIILLAVQILYYIILVVKFARELGDPKMLELAQELLELVRQALELGDFRLALQILTLVITLFEEIQHV

SEQ ID NO: 168 - protein, 221 aa, synthetic construct
  REGION 1..221: note = Synthetic
DDIRTLAEALAEVARRLAELAGNEELLELVRLIVETLIEAIKTGDEKQIRFALIAVEAVVLAVLAYTQALRAGNEELLELVRLIVETLIEAIKTGDEHLIFFALIAVEAVLLAVLAYLMAQQAGNEELLELVRLIVETLIEAIKTGDLRQIQFALIAVEAVLLAVLAYLMAQQAGNEELLELVRLIVETLIEAIKTGDERQILEALNLVFEVLTRVLEYLS

SEQ ID NO: 169 - protein, 222 aa, synthetic construct
  REGION 1..222: note = Synthetic
SKIEEILNEVELLILFVEHLARRLGDPELEEMARQLLESAERVLRNNDLEQAKIILILAQVLFYIARVLHLAKELGDPELEEMARQLLESAERVLRNNDLEQAKIILILAQVLYYIAQVLKLAKELGDPELEEMARQLLESAERVLRNNDLEQAEIILILAQVLYLIAQVLKLAKELGDPELEEMARQLLESAERVLRNNDREKAFRILTLAFKLYTLARLL

SEQ ID NO: 170 - protein, 220 aa, synthetic construct
  REGION 1..220: note = Synthetic
LEEFAIRIRYFIQLLELLARELGDPELYKTAQRLLEKLQEVTEMGDLEKIVLILFAVQIAFYIALLLKLARELGDPELYKTAQRLLEKLQEVTEMGDLEKIVLILFAVQIAYYIALLLKLARELGDPELYKTAQRLLEKLQEVTEMGDLEKIELILYAVQIAYYIALLLKLARELGDPELYKTAQRLLEKLQEVTEMGDQRKIIRILLEVRSAVEEAEYL

SEQ ID NO: 171 - protein, 220 aa, synthetic construct
  REGION 1..220: note = Synthetic
LDEFALQIEIIIRALEILARYLGDPELYKTAQRLLEKLQEVTEMGDLEKIVLILFAVQIAYYIALLLILARQLGDPELYKTAQRLLEKLQEVTEMGDLEKIVLILFAVQIAYYIALLLKLARELGDPELYKTAQRLLEKLQEVTEMGDERKINLILYAVQIAYYIALLLKLARELGDPELYKTAQRLLEKLQEVTEMGDLEKILRIYVEVIHAFLRAQEL

SEQ ID NO: 172 - protein, 220 aa, synthetic construct
  REGION 1..220: note = Synthetic
LEEFAYRILEYILRLELLARELGDPELYKTAQRLLEKLQEVTEMGDLEKIVLILFAVQIAYYIALLLKLARELGDPELYKTAQRLLEKLQEVTEMGDLEKIVLILFAVQIAYYIALLLKLARELGDPELYKTAQRLLEKLQEVTEMGDLEKIVLILFAVQIAYYIALLLKLARELGDPELYKTAQRLLEKLQEVTEMGDLEKIRQILYEVRLAFLHAEQL

SEQ ID NO: 173 - protein, 229 aa, synthetic construct
  REGION 1..229: note = Synthetic
DEHERLRTRILQILLEVEFIFQIAGNDPEILEAIQRVKELIEQAERATSEEDMRFILNLAQILSILVKVIFILKRAGNDPEILEAIQRVKELIEQAERATSEEDMRFILNLAQILSILVKVIFILKQAGNDPEILEAIQRVKELIEQAERATSEEDMRFILNLAQILSILVKVIFILKQAGNDPRILEAIQRVKELIEQAERATSEEEMIEILNLAQLLSQLVERIFKS

SEQ ID NO: 174 - protein, 250 aa, synthetic construct
  REGION 1..250: note = Synthetic
DEKELHILELALKLLQLAKELEHKAGDSVAKEIYETVKEMLEQFREALQRGDEETSRKVLKTLKILYLALRLLLLALELLQKAGDSVAKEIYETVKEMLEQFREALQRGDEETSRKVLKTLKILYLALRLLLLALELLQKAGDSVAKEIYETVKEMLEQFREALQRGDEETSRKVLKTLKILYLALRLLLLALELLQKAGDSVAKEIYETVKEMLEQFREALQRGDEETSRKVEQILRRLELQLRDLLES

SEQ ID NO: 175 - protein, 224 aa, synthetic construct
  REGION 1..224: note = Synthetic
DELEHLALEARLLILRVLLLAREAGDPELRESAQRIMRIALKALLAGNEEELRLVLLAARAILLIVQVYLLAKEAGDPELSESAQRIMRIALKALLAGNEEELRLVLLAARAILLIVQVYLLAKEAGDPELSESAQRIMRIALKALLAGNEEELRLVLLAARAILFIVQVYLLAKEAGDPELSESAQRIMRIALKALLAGNEEELLRVLATAYHILIEVRIHLS

SEQ ID NO: 176 - protein, 224 aa, synthetic construct
  REGION 1..224: note = Synthetic
DELEHLAQEARNFILLVEILAHKAGDPELSESAQRIMRIALKALLAGNEEELRLVLLAARAILLIVRVYILAKEAGDPELSESAQRIMRIALKALLAGNEEELRLVLLAARAILLIVQVYLLAKEAGDPELSESAQRIMRIALKALLAGNEEELRLVLLAARAILLIVQVYLLAKEAGDPELSESAQRIMRIALKALLAGNYEELLEVLVLAIRILLKVQRYLL

SEQ ID NO: 177 - protein, 224 aa, synthetic construct
  REGION 1..224: note = Synthetic
DERRQLANRVLILALLVTILVLEAGDPQLEESAKRLRESAMEALKAGDEESLKMALLAARVLYFAVLVYLLVQEAGDPQLLESAKRLIESAMEALKAGDEESLKMALLAARVLYFAVLVYLLVQEAGDPQLLESAKRLIESAMEALKAGDEESLKMALLAARVLYFAVLVYLLVQEAGDPQLLESAKRLIESAMEALKAGDEESLKRALHEARILFFLVRSELS

SEQ ID NO: 178 - protein, 224 aa, synthetic construct
  REGION 1..224: note = Synthetic
DELELLAIRVIYLALEVFKLVREAGDPQLRESAKRLEESAMEALKAGDEESLKMALLAARVLYFAVLVYLLVQEAGDPQLLESAKRLIESAMEALKAGDEESLKMALLAARVLYFAVLVYLLVQEAGDPQLLESAKRLIESAMEALKAGDEESLKMALLAARVLYFAVLVYLLVQEAGDPQLLESAKRLIESAMEALKAGDERRLHRALVHAKYLFEKVREYLS

SEQ ID NO: 179 - protein, 222 aa, synthetic construct
  REGION 1..222: note = Synthetic
DELEELSLRAHLLAYQAELFARLAGNPLLLEVVRTIIERILEALQEGDEEQIRLALLMARAVLLAAEAYLIALKAGNPLLLEVVRTIIERILEALQEGDEEQIRLALLMARAVLLAALAYELAKKAGNPLLLEVVRTIIERILEALQEGDEEQIRLALLMARAVLLAALAYELAKKAGNPLLLEVVRTIIERILEALQEGDEEQIRKALELAKRVLTEAESS

SEQ ID NO: 180 - protein, 224 aa, synthetic construct
  REGION 1..224: note = Synthetic
DRREILALLVEVFALRVKELVKKAGDPQLEESAKRLIESAMEALKAGDEESLKMALLAARVLYFAVLVYLLVQEAGDPQLLESAKRLIESAMEALKAGDEESLKMALLAARVLYFAVLVYLLVQEAGDPQLLESAKRLIESAMEALKAGDEESLKMALLAARVLYFAVLVYLLVQEAGDPQLLESAKRLIESAMEALKAGDRQRLRRALVDAKYLYEEVLVYLL

SEQ ID NO: 181 - protein, 224 aa, synthetic construct
  REGION 1..224: note = Synthetic
DELERLATQVEYFARLVEVLVRRAGDPQLLESAKRLIESAMEALKAGDEESLKMALLAARVLYFAVLVYLLVQEAGDPQLLESAKRLIESAMEALKAGDEESLKMALLAARVLYFAVLVYLLVQEAGDPQLLESAKRLIESAMEALKAGDEESLKMALLAARVLYFAVLVYLLVQEAGDPQLLESAKRLIESAMEALKAGDRRSLQQALFLAKLLYEKVLEYLL

SEQ ID NO: 182 - protein, 224 aa, synthetic construct
  REGION 1..224: note = Synthetic
DELEQQEFQIFELLFEAIKLAREMGDPEQQKLAEEVMKRFIQAVREGDQEKLELILQALIIILLLLKAIKLAQEMGDPEQQKLAEEVMKRFIQAVREGDQEKLELILQALIIILLLLKAIKLAQEMGDPEQQKLAEEVMKRFIQAVREGDQEKLELILQALIIILLLLKAIKLAQEMGDPEQQKLAEEVMKRFIQAVREGDQHKLLEILTELELILRRLELIKS

SEQ ID NO: 183 - protein, 224 aa, synthetic construct
  REGION 1..224: note = Synthetic
SELERQELKIRSLLLEAQALAIEMGDPEQQKLAEEVMKRFIQAVREGDQEKLELILQALIIILLLLKAIKLAQEMGDPEQQKLAEEVMKRFIQAVREGDQEKLELILQALIIILLLLKAIKLAQEMGDPEQQKLAEEVMKRFIQAVREGDQEKLELILQALIIILLLLKAIKLAQEMGDPEQQKLAEEVMKRFIQAVREGDQEKLLEIENELIRILQHLELIKR

SEQ ID NO: 184 - protein, 224 aa, synthetic construct
  REGION 1..224: note = Synthetic
SELEHQKTRIRLLLLEAIQLAIEMGDPEQRKLAEEVAKRFIQAVREGDQEKLELILQALIIILLLLKAIKLAQEMGDPEQQKLAEEVMKRFIQAVREGDQEKLELILQALIIILLLLKAIKLAQEMGDPEQQKLAEEVMKRFIQAVREGDQEKLELILQALIIILLLLKAIKLAQEMGDPEQQKLAEEVMKRFIQAVREGDQEKLHKIRLELLRIIQELELIKS

SEQ ID NO: 185 - protein, 222 aa, synthetic construct
  REGION 1..222: note = Synthetic
DEIELLINEARVIVQRVEYLAREAGDPEFQEFAKEILRTLLEIMQMGDLEKAKIVLLIARAALLVVLVYILAKQAGDPEFQEFAKEILRTLLEIMQMGDLEKAKIVLLIARAALLVVLVYILAKQAGDPEFQEFAKEILRTLLEIMQMGDLEKAKIVLLIARAALNVVLVYILAKQAGDPEFQEFAKEILRTLLEIMQMGDLRQAEKVLILALLAILEVLEY

SEQ ID NO: 186 - protein, 222 aa, synthetic construct
  REGION 1..222: note = Synthetic
DKIEELILRAQALVYLVEVLARIAGDPEFQEFAKEILRTLLEIMQMGDLEKAKIVLLIARAAVLVVLVYILAKKAGDPEFQEFAKEILRTLLEIMQMGDLEKAKIVLLIARAALLVVLVYILAKQAGDPEFQEFAKEILRTLLEIMQMGDLEKAKIVLLIARAALLVVLVYILAKQAGDPEFQEFAKEILRTLLEIMQMGDRRKAQRVLLLAQEALFRVEEY

SEQ ID NO: 187 - protein, 250 aa, synthetic construct
  REGION 1..250: note = Synthetic
DEMERLILRVEALLHYIEHLVRLLGDPELVRLAEDLLQTIKEAIETFKQGDLEKAKRLVEMALLIALVILLLAEIILQVRRLGDPELVRLAEDLLQTIKEAIETFKQGDLEKAKRLVEMALLIALVILLLAEIIEQVRQLGDPELVRLAEDLLQTIKEAIETFKQGDLEKAKRLVQMALLIALVILLLAEIIEQVRQLGDPRLVRLAEDLLQTIKEAIETFKQGDLRKAIELVLRAYSLALFILYLAELL

SEQ ID NO: 188 - protein, 250 aa, synthetic construct
  REGION 1..250: note = Synthetic
SEMHELLLRVEFLLHLIELLVRELGDPELVRLAEDLLQTIKEAIETFKQGDLEKAKRLVEMALLIALVILLLAEIIEQVRQLGDPELVRLAEDLLQTIKEAIETFKQGDLEKAKRLVEMALLIALVILLLAEIIEQVRQLGDPELVRLAEDLLQTIKEAIETFKQGDLEKAKRLVRMALLIALVILLLAEIIEQVRQLGDPRLVRLAEDLLQTIKEAIETFKQGDLEKALELVLRAFVEALFILYLAEHS

SEQ ID NO: 189 - protein, 238 aa, synthetic construct
  REGION 1..238: note = Synthetic
VRLEELVFEAKQLIELLTQNVRKLGDPELEKAMQLILELLLQALKANDDEKLEELVRLALLVAVALLLIVELTRQVRRLGDPELEKAMQLILELLLQALKANDDEKLEELVRLALLVAVALLLIVELTEQVRRLGDPELEKAMQLILELLLQALKANDDEKLEELVRLALLVAVALLLIVELTEQVRRLGDPELEKAMQLILELLLQALKANDDEKLRELVLRALSLAFKLLFDVLLS

SEQ ID NO: 190 - protein, 222 aa, synthetic construct
  REGION 1..222: note = Synthetic
NDLEVIMLRARILALTAYYIAKEAGNPLLLEVVRTIIERILEALQEGDEEQIRLALLMARAVLLAALAYLTALYAGNPLLLEVVRTIIERILEALQEGDEEQIRLALLMARAVLLAALAYELAKKAGNPLLLEVVRTIIERILEALQEGDEEQIKLALQMARAVLNAALAYELAKKAGNPLLLEVVRTIIERILEALQEGDKEQIKEADKLAFEVLVEAENS

SEQ ID NO: 191 - protein, 238 aa, synthetic construct
  REGION 1..238: note = Synthetic
SELEILVFRAKVLIDQLKQLVEFLGDPELEKAMQLILELLLQALKANDDEKLEELVRLALLVAVALLLIVRLTQEVRRLGDPELEKAMQLILELLLQALKANDDEKLEELVRLALLVAVALLLIVELTEQVRRLGDPELEKAMQLILELLLQALKANDDEKLEELVRLALLVAVALLLIVELTEQVRRLGDPELEKAMQLILELLLQALKANDDRKLFELVLRALYLAFRLLFIVRQT

SEQ ID NO: 192 - protein, 238 aa, synthetic construct
  REGION 1..238: note = Synthetic
SELEFLVQQARLIIELLEHLVRRLGDPELEKAMQLILELLLQALKANDDEKLEELVRLALLVAVALLLIVELTEQVRRLGDPELEKAMQLILELLLQALKANDDEKLEELVRLALLVAVALLLIVELTEQVRRLGDPELEKAMQLILELLLQALKANDDEKLEELVRLALLVAVALLLIVELTEQVRRLGDPELEKAMQLILELLLQALKANDDKKLYELVLQAIVLALLLLYRVRLT

SEQ ID NO: 193 - protein, 238 aa, synthetic construct
  REGION 1..238: note = Synthetic
SELEELVTRAKQIIELLEQYVKHLGDPELEKAMQLILELLLQALKANDDEKLEELVRLALLVAVALLLIVELTEQVRRLGDPELEKAMQLILELLLQALKANDDEKLEELVRLALLVAVALLLIVELTEQVRRLGDPELEKAMQLILELLLQALKANDDEKLEELVRLALLVAVALLLIVELTEQVRRLGDPELEKAMQLILELLLQALKANDDRKLEELVLRAIVLAFELLIIVHLS

SEQ ID NO: 194 - protein, 238 aa, synthetic construct
  REGION 1..238: note = Synthetic
SRLEELSTRAEANIRYLEVIVRFLGDPELEKAMQLILELLLQALKANDDEKLEELVRLALLVAVALLLIVELTQQVRRLGDPELEKAMQLILELLLQALKANDDEKLEELVRLALLVAVALLLIVELTEQVRRLGDPELEKAMQLILELLLQALKANDDEKLEELVRLALLVAVALLLIVELTEQVRRLGDPELEKAMQLILELLLQALKANDDEKLEELVREAILLALQLLLEVLQT

SEQ ID NO: 195 - protein, 214 aa, synthetic construct
  REGION 1..214: note = Synthetic
DDERSLFLKIELILIEIKKLAREMGDEEMYQTAQELLRRVKEAGTDEEKLKILLITAEIVYILALISVLAKEMGDEEMYQTAQELLRRVKEAGTDEEKLKILLITAEIVYILALISVLAKEMGDEEMYQTAQELLRRVKEAGTDEEKLKILLITAEIVYILALISVLAKEMGDEEMYQTAQELLRRVKEAGTDERKLLRLLSLARHLYSEARIS

SEQ ID NO: 196 - protein, 214 aa, synthetic construct
  REGION 1..214: note = Synthetic
DKIERIIVRIRSILYRIELLAELMGDEEMYQTAQELLRRVKEAGTDEEKLKILLITAEIVYILALISDLARKMGDEEMYQTAQELLRRVKEAGTDEEKLKILLITAEIVYILALISVLAKEMGDEEMYQTAQELLRRVKEAGTDEEKLKILLITAEIVYILALISVLAKEMGDEEMYQTAQELLRRVKEAGTDEEKLKRLRELAQRVHLEARES

SEQ ID NO: 197 - protein, 222 aa, synthetic construct
  REGION 1..222: note = Synthetic
DRLEELLIHATILLLRIELLVHRAGQPEFLKTAQELLEQLKRAMEEGDEEKLRLLLLLVEAIYLLALIILLVQEAGQPEFLKTAQELLEQLKRAMEEGDEEKLRLLLLLVEAIYLLALIILLVQEAGQPEFLKTAQELLEQLKRAMEEGDEEKLRLLLLLVEAIYLLALIILLVQEAGQPEFLKTAQELLEQLKRAMEEGDEEKLRQLLLRVREILVRAEYL

SEQ ID NO: 198 - protein, 222 aa, synthetic construct
  REGION 1..222: note = Synthetic
DEIEIIAFEAELLILRVRHLAKKTGDPEAFRSAKELIEQLREMSQQGNEEEVRILFLAVSALYYILLVLLLAQKTGDPEAFRSAKELIEQLREMSQQGNEEEVRILFLAVSALYYILLVLLLAQKTGDPEAFRSAKELIEQLREMSQQGNEEEVRILFLAVSALYYILLVLLLAQKTGDPEAFRSAKELIEQLREMSQQGNEEEVRKILREVLILLLELESS

SEQ ID NO: 199 - protein, 222 aa, synthetic construct
  REGION 1..222: note = Synthetic
SRIEELATKAEILIYAVLLLARLTGDPEAFRSAKELIEQLREMSQQGNEEEVRILFLAVSALYYILLVLLLAQKTGDPEAFRSAKELIEQLREMSQQGNEEEVRILFLAVSALYYILLVLLLAQKTGDPEAFRSAKELIEQLREMSQQGNEEEVRILFLAVSALYYILLVLLLAQKTGDPEAFRSAKELIEQLREMSQQGNEEEVRRLLLEVLELFNRLLYL

SEQ ID NO: 200 - protein, 214 aa, synthetic construct
  REGION 1..214: note = Synthetic
DEREQIILQIRFIIHEILRIAKELGDPELHQTAQELERRVKEAGTDQEKLKILLIIAEILLIIALILRLAQELGDPELFQTAQELLRRVKEAGTDQEKLKILLIIAEILLIIALILRLAQELGDPELFQTAQELLRRVKEAGTDQEKLKILLIIAEILLIIALILRLAQELGDPELFQTAQELLRRVKEAGTDQEKLHELLREALELLVRARAL

SEQ ID NO: 201 - protein, 222 aa, synthetic construct
  REGION 1..222: note = Synthetic
DELEYIMIEARLLAELARSIAERAGNPLLLEVVRTIIERILEALQEGDEEQIRLALLMARAVLLAALAYELAKKAGNPLLLEVVRTIIERILEALQEGDEEQIRLALLMARAVLLAALAYELAKKAGNPLLLEVVRTIIERILEALQEGDEKQIRLALLMARAVLLAALAYELAKKAGNPLLLEVVRTIIERILEALQEGDDEQILKAYLLALEVLLRAENY

SEQ ID NO: 202 - protein, 214 aa, synthetic construct
  REGION 1..214: note = Synthetic
DREEALILRIRAIIFEILRIAKELGDPELEQTARELERRVKEAGTDQEKLKILLIIAEILLIIALILRLAQELGDPELFQTAQELLRRVKEAGTDQEKLKILLIIAEILLIIALILRLAQELGDPELFQTAQELLRRVKEAGTDQEKLKILLIIAEILLIIALILRLAQELGDPELFQTAQELLRRVKEAGTDEEKLTELLSEALELLNRARQL

SEQ ID NO: 203 - protein, 214 aa, synthetic construct
  REGION 1..214: note = Synthetic
DEERILISIIEAIILAIKHLARSLGDPELFQTAQELERRVKEAGTDKEKLKILLIIAEILYIIALILLIAQVLGDPELFQTAQELLRRVKEAGTDERKLRILLLIAEILLIIALILLLAQELGDPELFQTAQELLRRVKEAGTDFEKLIILYLIAQILLIIAEILRLAQELGDPELFQTAQELLRRVKEAGTDLRRLVELLAEALQLLVKAFKL

SEQ ID NO: 204 - protein, 203 aa, synthetic construct
  REGION 1..203: note = Synthetic
IELIRRIELLILQIETLARFAGDEEFIEQAKELFRRAQEMDEEQLQKIWLIVSIIYLILLIILLAQEAGDEEFIEQAKELFRRAQEMDEEQLQKIWLIVSIIYLILLIILLAKEAGDEEFIEQAKELFRRAQEMDEEQLQKIWLIVHIIYLILLIILLAKEAGDEEFIEQAKELFRRAQEMDKRQLYRILEIVSKIYIRLREL

SEQ ID NO: 205 - protein, 203 aa, synthetic construct
  REGION 1..203: note = Synthetic
DELEQHLLHLIFEVISIAHILGDPRFIETAQELRERAREMDEEDLRKMILIVLLILLILLVIYYAKRLGDPRFIETAQELFERAQEMDEEDLRKMILIVLLILLILLVIKYAKELGDPRFIETAQELFERAQEMDEEDLRKMILIVLLILLILLVIKYAKELGDPRFIETAQELFERAQEMDEEDLREMLREVREILTRLQIL

SEQ ID NO: 206 - protein, 219 aa, synthetic construct
  REGION 1..219: note = Synthetic
SLETEQIEVLVNLVRFFAQELGDPTLRESARRLLEEVIQAYEAGDEEKLKQLLETLKILLMVARVLWWAQELGDPTLRESARRLLEEVIQAYEAGDEEKLEQLLETLKILLMVARVLWWAQELGDPTLRESARRLLEEVIQAYEAGDEEKLHELLFTLKILLMVARVLWWAQELGDPTLRESARRLLEEVIQAYEAGDLELLIRLYFLLLRLLHVARRL

SEQ ID NO: 207 - protein, 246 aa, synthetic construct
  REGION 1..246: note = Synthetic
AELARRVEYLVRLVRLLAELIKEKDPETAKRISELALEIIQFIWEVMKAGDEEKARIALLAAQVALLVAQVLLYALEISRKDPETAKRISELALEIIQFIWEVMKAGDEEKARIALLAAQVALLVAQVLLYALEISRKDPETAKRISELALEIIQFIWEVMKAGDEEKARIALLAAQVALLVAQVLLYALEISRKDPETAKRISELALEIIQFIWEVMKAGDERKAREARLLALKALIRAQELVQA

SEQ ID NO: 208 - protein, 246 aa, synthetic construct
  REGION 1..246: note = Synthetic
DELAEEVRSIVDLVRSVARSISRKDPETAKRISELALEIIQFIWEVMKAGDEEKARIALLAAQVALLVALVLLYALKISEKDPETAKRISELALEIIQFIWEVMKAGDEEKARIALLAAQVALLVAQVLLYALEISRKDPETAKRISELALEIIQFIWEVMKAGDEHKARIALLAAQVALLVAQVLLYALEISRKDPETAKRISELALEIIQFIWEVMKAGDFRKALKAFYLAYEALVVAEELLYA

SEQ ID NO: 209 - protein, 225 aa, synthetic construct
  REGION 1..225: note = Synthetic
SEMEILARYVELLVQLVKLYARELGDPELYELAKQIARIIWEALQAGDEELLRMARLAVIVLLLVARVSKYAKELGDPELYELAKQIARIIWEALQAGDEELLRMALLAVIVLLLVARVSKYAKELGDPELYELAKQIARIIWEALQAGDEELLRMALLAVIVLLLVARVSKYAKELGDPELYELAKQIARIIWEALQAGDYHLLLRALHLVHELLLVARVSKYA

SEQ ID NO: 210 - protein, 222 aa, synthetic construct
  REGION 1..222: note = Synthetic
DELEQIAKRVRILVLYVETLAEHLGDPEIYENAREIARIILEALQRGDLEQLELALLAVKVLLLVAKVLFFAKQLGDPEIYENAREIARIILEALQRGDLEQLELALLAVKVLLLVAKVLFFAKQLGDPEIYENAREIARIILEALQRGDLEQLELALLAVKVLLLVAKVLFFAKQLGDPEIYENAREIARIILEALQRGDRRQLQEALLEVLRLLIKAEEL

SEQ ID NO: 211 - protein, 250 aa, synthetic construct
  REGION 1..250: note = Synthetic
DEIAQEVRIIVRYIELLAERIRQQGDEELARQISELARRIAEFISKALQAGDKEKLEMALLAVIVVLLVAEIIEFALRIRKQGDEELARQISELARRIAEFISKALQAGDKEKLEMALLAVIVVLLVAEIIEFALRIRKQGDEELARQISELARRIAEFISKALQAGDKEKLEMALLAVIVVLLVAEIIEFALRIRKQGDEELARQISELARRIAEFISKALQAGDKRKLLQALLLVLQVLLLAQRIEIS

SEQ ID NO: 212 - protein, 221 aa, synthetic construct
  REGION 1..221: note = Synthetic
DLERLRAETLAYLAELLAKRAGDPKAVEVVKLVLQRIIEALRAGDEEKIRLILLMARAVLYAAQALILALRAGDPKAVEVVKLVLQRIIEALRAGDEEKIRLILIMARAVWYAAQALLLAKEAGDPKAVEVVKLVLQRIIEALRAGDEEKIRLILRMAIAVWSAAEALLLAKEAGDPKAVEVVKLVLQRIIEALRAGDEEKIKEILRLANEVYIEAHQILL

SEQ ID NO: 213 - protein, 250 aa, synthetic construct
  REGION 1..250: note = Synthetic
DFEALLVKTLVRIIELFAEFIRSFGDEELARQISELARRIAEFISKALQAGDKEKLEMALLAVIVVLLVALIIVFALRIRLQGDEELARQISELARRIAEFISKALQAGDKEKLEMALLAVIVVLLVAEIIEFALRIRKQGDEELARQISELARRIAEFISKALQAGDRRKLYMALLAVIVVLLVAEIIEFALRIRKQGDEELARQISELARRIAEFISKALQAGDLEKLQMAFEAVFRVLQLAYRIEDA

SEQ ID NO: 214 - protein, 222 aa, synthetic construct
  REGION 1..222: note = Synthetic
SELEQLAYEVKIIILLILFLAKQTGDPELYEIAREIVRIILEALQRGDEEQLKLALLAALVVLLIVRILQMAKQTGDPELYEIAREIVRIILEALQRGDEEQLKLALLAALVVLLIVRILLMAKQTGDPELYEIAREIVRIILEALQRGDERQLELALLAALVVLLIVRILLMAKQTGDPELYEIAREIVRIILEALQRGDDHQLLEALNLALHVLLRVRRL

SEQ ID NO: 215 - protein, 222 aa, synthetic construct
  REGION 1..222: note = Synthetic
DELELLANQVKHIIKLILELAKYTGDPELYEIAREIVRIILEALQRGDEEQLKLALLAALVVHLIVEILIMAKQTGDPELYEIAREIVRIILEALQRGDEEQLKLALLAALVVLLIVRILLMAKQTGDPELYEIAREIVRIILEALQRGDEKQLRLALLAAEVVLLIVRILLMAKQTGDPELYEIAREIVRIILEALQRGDLELLLRAYTRALEVLEIVRIL

SEQ ID NO: 216 - protein, 225 aa, synthetic construct
  REGION 1..225: note = Synthetic
DELEYLALEVIFLVKQASKYAKELGDPEIYEFAREIERIAREALQRGDEKQLRLALLAVRVLLLVAQASKYAKELGDPEIYEFAREIVRIATEALQRGDEKQLRLALLAVRVLLLVAQASKYAKELGDPEIYEFAREIVRIATEALQRGDEKQLRLALLAVRVLLLVAQASKYAKELGDPEIYEFAREIVRIATEALQRGDERLLRHAELLVQELLSHAQLVKIS

SEQ ID NO: 217 - protein, 225 aa, synthetic construct
  REGION 1..225: note = Synthetic
DELELLASRVSSLVFEALRYAKELGDPEIREFAREILRIATEALQRGDEKQLRLALLAVRVLLLVAQASKYAKELGDPEIYEFAREIVRIATEALQRGDEKQLRLALLAVRVLLLVAQASKYAKELGDPEIYEFAREIVRIATEALQRGDEKQLRLALLAVRVLLLVAQASKYAKELGDPEIYEFAREIVRIATEALQRGDEKQLRLAERLVRELLLEAELLKLR

SEQ ID NO: 218 - protein, 225 aa, synthetic construct
  REGION 1..225: note = Synthetic
DELEELAKTVHLLVYQAELYAKRLGDPEIYEFAREIVRIATEALQRGDEKQLRLALLAVRVLLLVAQASKYAKELGDPEIYEFAREIVRIATEALQRGDEKQLRLALLAVRVLLLVAQASKYAKELGDPEIYEFAREIVRIATEALQRGDEKQLRLALLAVLVLLLVAQASKYAKELGDPEIYEFAREIVRIATEALQRGDERLLLEALILVHHLLLRARQSERS

SEQ ID NO: 219 - protein, 250 aa, synthetic construct
  REGION 1..250: note = Synthetic
DELYLRALVILFEAHLIAELTKRQGDLETARTLSELVRKAMEQLEEVRQAGDMEQLEEVLLFAIALLILAQAYKIAQETKKQGDLETARTLSELVRKAMEQLEEVRQAGDMEQLEEVLLFAIALLILAQAYKIAQETKKQGDLETARTLSELVRKAMEQLEEVRQAGDMEQLEEVLIFAIALLILAQAYKIAQETKKQGDLETARTLSELVRKAMEQLEEVRQAGDRQQLLEVQTFAEELLVRARNYKQS

SEQ ID NO: 220 - protein, 250 aa, synthetic construct
  REGION 1..250: note = Synthetic
DELFTRAHVILYEAKLIAEQTKRQGDLETARTLSELVRKAMEQLEEVRQAGDEKQLEEVLLFAIALVILALAYLIAQETKKQGDLETARTLSELVRKAMEQLEEVRQAGDRNLLILVLLFAIALLILARAYRIAQETKKQGDLETARTLSELVRKAMEQLEEVRQAGDSHLLVLVLLFAIALLILAQAYKIAQETKKQGDLETARTLSELVRKAMEQLEEVRQAGDERLLFQILAFALQLLHQAEQYLIS

SEQ ID NO: 221 - protein, 250 aa, synthetic construct
  REGION 1..250: note = Synthetic
DRLYIKALSILFEAHLIAELTKKQGDLETARTLSELVRKAMEQLEEVRQAGDMEQLEEVLLFAIALLILAEAYLIAQETKKQGDLETARTLSELVRKAMEQLEEVRQAGDMEQLEEVLLFAIALLILAQAYKIAQETKKQGDLETARTLSELVRKAMEQLEEVRQAGDREQLREVLTFAIALLILAQAYKIAQETKKQGDLETARTLSELVRKAMEQLEEVRQAGDHQQLLEVLLFALELLIRAEEYKHS

SEQ ID NO: 222 - protein, 219 aa, synthetic construct
  REGION 1..219: note = Synthetic
DEIMQEAKQIAHQIEFIARELGDPELWESAKRLLELLKEAERRGSDEDLQRVFIMVSAILLAAHILLIALLLGDPELWESAKRLLELLKEAERRGSDEDLQRVFIMVSAILLAALILLIAKRLGDPELWESAKRLLELLKEAERRGSDEDLKRVFLMVVAILIAAQILKIAKQLGDPELWESAKRLLELLKEAERRGSDEDLRHVFELVNRLLARALLS

SEQ ID NO: 223 - protein, 221 aa, synthetic construct
  REGION 1..221: note = Synthetic
SELERIYAEILRLAIELHVLARELGDPELMQQVREALKTVIKAFEAGDEETLRLVLIFIQISILAIELWELAKELGDPELMQQVREALKTVIKAFEAGDEETLRLVLIFIQISILAIELWELAKELGDPELMQQVREALKTVIKAFEAGDEETLRLVLIFIQISILAIELWELAKELGDPELMQRVREALKLVIKAFEAGDEETLRRVYIQIRADILQIKS

SEQ ID NO: 224 - protein, 224 aa, synthetic construct
  REGION 1..224: note = Synthetic
SERYHLYAEVLKLLVIIEVLAEDTGDPEFLESVKQAKRELRKAFEAGDDEKLERVLMFAIVIFLLILIYILAKRTGDPEFLESVKQALRELRKAQEAGDDEKLERVLMFAIVIWLLILIYYLAKQTGDPEFLESVKQALRELRKAQEAGDDEKLERVLMFAIVIWLLILIYYLAKQTGDPEFLESVKQALRELRKAQEAGDDEKLERVLRFARQIFLKIELYFN

SEQ ID NO: 225 - protein, 222 aa, synthetic construct
  REGION 1..222: note = Synthetic
DHRERIFQEVRRNIYEIEDLAKLLGDPELTEFAKQALRELRKAQEAGDDEQLERIYIFVEVVLLIARITHIAKLLGDPELTEFAKQALRELRKAQEAGDDEQLERIYIFVEVVYLIARITQIARLLGDPELTEFAKQALRELRKAQEAGDDEQLERIYIFVEVVYLIARITEIAKELGDPELTEFAKQALRELRKAQEAGDDEQLERIYEFVRRVFFEAELL

SEQ ID NO: 226 - protein, 251 aa, synthetic construct
  REGION 1..251: note = Synthetic
STEFRAILLEIEALAILAEELAKELGDPEAEEIAKRILQLLEQVWRTMEEKGEEEALSRLEFLLLSVKIVFYALLALKLAKQLGDPEAEEIAKRILQLLEQVWRTMEEKGEEEALSRLEFLLLSVKIVFYALLALKLAKQLGDPEAEEIAKRILQLLEQVWRTMEEKGEEEALSRLRFLLHSVKIVFYALLALKLAKQLGDPEAEEIAKRILQLLEQVWRTMEEKGREEALRRLLRLLADVEHVFRYLLEL

SEQ ID NO: 227 - protein, 251 aa, synthetic construct
  REGION 1..251: note = Synthetic
SEEFERLFREIELLAQLAEHLAKELGDPEAEEIAKRILQLLEQVWRTMEEKGEEEALSRLEFLLLSVKIVVYALLALLLAKQLGDPEAEEIAKRILQLLEQVWRTMEEKGEEEALSRLEFLLLSVKIVFYALLALKLAKQLGDPEAEEIAKRILQLLEQVWRTMEEKGEEEALERLRFLLLSVKIVFYALLALKLAKQLGDPEAEEIAKRILQLLEQVWRTMEEKGEEEAFKRLARLYAEVIYVFLVLKHL

SEQ ID NO: 228 - protein, 224 aa, synthetic construct
  REGION 1..224: note = Synthetic
DEMRELVLEIELFALRAKRLAEETGDPELRQTVKEIHESLRKALERGDEELLKMLLLIAQIVYYAALALLLAQETGDPELRQTVKEIIESLRKALERGDEELLKMLLLIAQIVYYAALALLLAQETGDPELRQTVKEIIESLRKALERGDEELLKMLLLIAQIVYYAALALLLAQETGDPELRQTVKEIIESLRKALERGDEELLQELLHLARLVYLRALRLLL

SEQ ID NO: 229 - protein, 251 aa, synthetic construct
  REGION 1..251: note = Synthetic
DEELEYLVLQILLLVLNVLKLARQAGNPEFLQSAQELRERLKEIIRIFEEKGAEEALKRIKLLLLVARIAYLVIRVFILAKQAGNPEFLQSAQELLERLKEIIRIFEEKGAEEALKRIKLLLLVARIAYLVIRVFILAKQAGNPEFLQSAQELLERLKEIIRIFEEKGAEEALKRIKLLLLVARIAYLVIRVFILAKQAGNPEFLQSAQELLERLKEIIRIFEEKGAEEALDLIFRLELRALRALQEIRRF

SEQ ID NO: 230 - protein, 251 aa, synthetic construct
  REGION 1..251: note = Synthetic
REELEHLVNEIKILVLLVHFLAKEAGNPEFLQSAQELLERLKEIIRIFEEKGAEEALKRIKLLLLVARIAVLVIRVFILAKQAGNPEFLQSAQELLERLKEIIRIFEEKGAEEALKRIKLLLLVARIAYLVIRVFILAKQAGNPEFLQSAQELLERLKEIIRIFEEKGAEEALKRIELLLYVARIAYLVIRVFILAKQAGNPEFLQSAQELLERLKEIIRIFEEKGAEEALERILQLYIDAVIAVYKIRIS

SEQ ID NO: 231 - protein, 251 aa, synthetic construct
  REGION 1..251: note = Synthetic
RRKLEELVHTIELLVLNVRVLARLAGNPEFLQSAQELLERLKEIIRIFEEKGAEEALKRIKLLLLVARIAYLVIRVFILAKQAGNPEFLQSAQELLERLKEIIRIFEEKGAEEALKRIKLLLLVARIAYLVIRVFILAKQAGNPEFLQSAQELLERLKEIIRIFEEKGAEEALKRIKLLLLVARIAYLVIRVFILAKQAGNPEFLQSAQELLERLKEIIRIFEEKGAEEAHRRILRLYLRALEALIRIEEF

SEQ ID NO: 232 - protein, 192 aa, synthetic construct
  REGION 1..192: note = Synthetic
SEEFKLILQLIRSLVELVEHLARYLGNPELWESARKLLQLIEEMLELFRKDDERALKSVKFLLLLAYIIYYVALVLKLAQELGNPELWESARKLLQLIEEMLELFRKDDERALKSVKFLLLLARIIYLVAEVLKLAQELGNPELWESARKLLQLIEEMLELFRKDDERARKEVLELLVRAIRILAEAIHLHS

SEQ ID NO: 233 - protein, 224 aa, synthetic construct
  REGION 1..224: note = Synthetic
DELEELALEVLLLIIRVHFLVRQIGDEELLQTARELLEELVKAHRAGDEEKMRNIYLAASVILLIILVLLLVQKLGDEELLQTARELLEELVKAFRAGDEEKMRNIYLAASVILLIILVLLLVKQLGDEELLQTARELLEELVKAFRAGDEEKMRNIYLAASVILLIILVLLLVKQLGDEELLQTARELLEELVKAFRAGDEEKMHEIYLRAVEILLRILYLLL

SEQ ID NO: 234 - protein, 221 aa, synthetic construct
  REGION 1..221: note = Synthetic
SRLERIYVHILALALELENLARFLGDPELMQQVREALKTVIKAFEAGDEETLRLVLIFIQISILAIELWLLAEELGDPELMQQVREALKTVIKAFEAGDEETLRLVLIFIQISILAIELWELAKELGDPELMQQVREALKTVIKAFEAGDRQTLRLVLIFIQISILAIELWELAKELGDPELMQQVREALKTVIKAFEAGDQETLLRVYIFIELLIQRIKE

SEQ ID NO: 235 - protein, 222 aa, synthetic construct
  REGION 1..222: note = Synthetic
DELEHLLYEVYLILYQVRRYAKELGDPEFFRTAQEILERAVRASQEGDEETLKLLLMLARVILILVQVLKYAKELGDPEFFRTAQEILERAVRASQEGDEETLKLLLMLARVILILVQVLKYAKELGDPEFFRTAQEILERAVRASQEGDEETLKLLLMLARVILILVQVLKYAKELGDPEFFRTAQEILERAVRASQEGDEETLHQLLLYAFIILFRVEIL

SEQ ID NO: 236 - protein, 222 aa, synthetic construct
  REGION 1..222: note = Synthetic
DQEEVLALQVEFLLLQIKILVKQTGDPEMMESAKELLRRLIEALRNGDFETIKQLLIAAQVLYLLAEILILVQQTGDPEMMESAKELLRRLIEALRNGDFETIKQLLIAAQVLYLLAEILILVQQTGDPEMMESAKELLRRLIEALRNGDFETIKQLLVAAQVLYLLAEILILVQQTGDPEMMESAKELLRRLIEALRNGDRRTIEELLTLAYELFLKAEEL

SEQ ID NO: 237 - protein, 222 aa, synthetic construct
  REGION 1..222: note = Synthetic
DDQEQIANEVRSLLYLIRFTVKLTGDPEMMESAKELLRRLIEALRNGDFETIKQLLIAAQVLFLLAKILLLVQQTGDPEMMESAKELLRRLIEALRNGDFETIKQLLIAAQVLYLLAEILILVQQTGDPEMMESAKELLRRLIEALRNGDERTIYRLLVAAQVLYLLAEILILVQQTGDPEMMESAKELLRRLIEALRNGDIEKIFRLLARAFELFLLAEIL

SEQ ID NO: 238 - protein, 224 aa, synthetic construct
  REGION 1..224: note = Synthetic
DEQEYLVAEVLILLFRAYKLAEKAGDPSFQESVREIEEELQRAFELGDEETMRQLLILAQVLLLLALAFLLAQKAGDPSFQESVKEILEELQRAFELGDEETMRQLLILAQVLLLLALAFLLAQKAGDPSFQESVKEILEELQRAFELGDEETMRQLLILAQVLLFLALAFLLAQKAGDPSFQESVKEILEELQRAFELGDEQTMRELKYLAIRLLVEARLLLE

SEQ ID NO: 239 - protein, 224 aa, synthetic construct
  REGION 1..224: note = Synthetic
DEQHEIVTEVRILLYEAELVAELAGDPSFQESVKEILEELQRAFELGDEETMRQLLILAQVLVLLARAFLLAQKAGDPSFQESVKEILEELQRAFELGDEETMRQLLILAQVLLLLALAFLLAQKAGDPSFQESVKEILEELQRAFELGDEQTMRQLLLLALVLLLLALAFLLAQKAGDPSFQESVKEILEELQRAFELGDYETMVHLLARATKLFFEAEQTLS

SEQ ID NO: 240 - protein, 219 aa, synthetic construct
  REGION 1..219: note = Synthetic
DELLRELYLQVIAYIIFIQEAGDEESTEFLKRVLEQIKELQKAGDIEEAILYALLAILFALVTRMIRRIQEAGDEESTEFLKRVLEQIKELQKAGDIEEAILYALLAILFALVTLMIRRIQEAGDEESTEFLKRVLEQIKELQKAGDIEEAILYALLAILFALVTLMIRRIQEAGDEESTEYLKRVLEQIKELQKAGDIEEAIQFARRAIAYALHTRVS

SEQ ID NO: 241 - protein, 219 aa, synthetic construct
  REGION 1..219: note = Synthetic
YDELRRLFFLVRAAIEHIREAGDEESTEFLKRVLEQIKELQKAGDIEEAILYALLAILFAEVTQNIRQIQRAGDEESTEFLKRVLEQIKELQKAGDIEEAILYALLAILFALVTLMIRRIQEAGDEESTEFLKRVLEQIKELQKAGDIREAILYARLAILFALVTLMIRRIQEAGDEESTEFLKRVLEQIKELQKAGDILEAIRLALEALTYAHITELS

SEQ ID NO: 242 - protein, 249 aa, synthetic construct
  REGION 1..249: note = Synthetic
DELEELRLRLEFLLQRVKELAKQAGSEVFEEALRMAQELVKRVLELLRQGNYEEARKFAELALLVLLLILLLLKVKQLAKQAGSEVFEEALRMAQELVKRVLELLRQGNYEEARKFAELALLVLLLILLLLLVKQLAKQAGSEVFEEALRMAQELVKRVLELLRQGNYEEARRFAHLALLVLLLILLLLLVKQLAKQAGSEDYEEALRMAQELVKRVLELLRQGNYERAIQHAIQALAQLEAIRRLVES

SEQ ID NO: 243 - protein, 249 aa, synthetic construct
  REGION 1..249: note = Synthetic
DELERLKHLLQYLHEFVKKNAKQAGSEVFEEALRMAQELVKRVLELLRQGNYEEARKFAELALLVLLLILLLLLVKQLAKQAGSEVFEEALRMAQELVKRVLELLRQGNYEEARKFAELALLVLLLILLLLLVKQLAKQAGSEVFEEALRMAQELVKRVLELLRQGNYEEARKFAELALLVLLLILLLLLVKQLAKQAGSEEFEEALRMAQELVKRVLELLRQGNYEEARRFAIRALLLLEYIVNLLRL

SEQ ID NO: 244 - protein, 222 aa, synthetic construct
  REGION 1..222: note = Synthetic
SEKEETIRRMLELILQIHSLVKFLGDPELLEQARRLLEKLKQAEERGDDETIEKLLTLVKMTYLIALIFELVQQLGDPELLEQARRLLEKLKQAEERGDDETIEKLLTLVKMTYLIALIFQLVQQLGDPELLEQARRLLEKLKQAEERGDDETIEKLLLLVKMTYLIALIFQLVQQLGDPELLEQARRLLEKLKQAEERGDDETIKELLTEVLHTFHQAQLS

SEQ ID NO: 245 - protein, 237 aa, synthetic construct
  REGION 1..237: note = Synthetic
DQKLFRFLSYVRLHIELVQFIAHLLGDEELWESAQQLLETVERILRDSGEEALRQVKLIYFLAQVLYYIALVLQLAKELGDEELWESAQQLLETVERILRDSGEEALRQVKLIYFLAQVLWYIALVLKLAKELGDEELWESAQQLLETVERILRDSGEEAHRQVLLIYFLAQVLWFIALVLKLAKELGDEELWESAQQLLETVERILRDSGEEALHQVLRIYVEAIYLFLVAELRKS

SEQ ID NO: 246 - protein, 235 aa, synthetic construct
  REGION 1..235: note = Synthetic
RLEIIEQAKKLVYLVKASALLLREKDEEKARQMFETAQELAERVQKSTDEEELKRLLIILQAILLVLLVLLLAEELSRKDEEKARQMFETAQELAERVQKSTDEEELKRLLIILQAIYLVLKVLKLAEELSRKDEEKARQMFETAQELAERVQKSTDEHELLLLLLILQAIYLVLKVLKLAEELSRKDEETARQMFETAQELAERVQKSTDIHELVHLLAILIELLLLLEVSKQQ

SEQ ID NO: 247 - protein, 222 aa, synthetic construct
  REGION 1..222: note = Synthetic
DEELEKLIEAEYLMQKAELLARKMGDPEFIESVRQLLEELKRAKQSGDEEKIEEILKLALALYLMLLAYLLAKQMGDPEFIESVRQLLEELKRAKQSGDEEKIEEILKLALALYLMLLAYLLAKQMGDPEFIESVRQLLEELKRAKQSGDEEKIEEILKLALALYLMLLAYLLAKQMGDPEFIESVRQLLEELKRAKQSGDEKKIEQIITLAEYLLQQLELY

SEQ ID NO: 248 - protein, 221 aa, synthetic construct
  REGION 1..221: note = Synthetic
DFESTHLHVLLSVVETIARSLGDPELEKSVERLLELAKQAEQTGDLETLKFIMLSALLFVLLAYVLLIARYLGDPELEKSVERLLELAKQAEQTGDLETLRFIMLSALLFWLLAQVLRYARKLGDPELEKSVERLLELAKQAEQTGDSHLLLFIYISAFLFWLLAQVLEYARKLGDPELEKSVERLLELAKQAEQTGDFETLLKIAALALELYLRALLIEL

SEQ ID NO: 249 - protein, 219 aa, synthetic construct
  REGION 1..219: note = Synthetic
DEREIEAIILVTRVRLYAEHTGDPEFKEMAKQLFEKLVEAIQRGDMEEIEKILLQLRALLLVLLVMYFARETGDPEFKEMAKQLFEKLVEAIQRGDMEEIKHILFQLEALLLVLQVMKSARETGDPEFKEMAKQLFEKLVEAIQRGDQEEILHILIQLLALLLVLQVMKSARETGDPEFKEMAKQLFEKLVEAIQRGDEHEILRIYALLQILLLRLENL

SEQ ID NO: 250 - protein, 219 aa, synthetic construct
  REGION 1..219: note = Synthetic
DERELEALELVFLVLAAARFTGDPEFKEMAKQLHEKLEEALQRGDMEEIEKILRQLRALLLVLLVMISAHRTGDPEFKEMAKQLFEKLVEAIQRGDMEEIEKILRQLRALLLVLQVMLSARETGDPEFKEMAKQLFEKLVEAIQRGDMEEIEKILRQLEALLLVLQVMKSARETGDPEFKEMAKQLFEKLVEAIQRGDMEEIRKILRLLNHLLTELEDS

SEQ ID NO: 251 - protein, 219 aa, synthetic construct
  REGION 1..219: note = Synthetic
DERQLEALRLVYNVRAAAQFTGDPEFKEMAKQLYEKLEEALQRGDMEEIEKILRQLRALLLVLLVMLLARQTGDPEFKEMAKQLFEKLVEAIQRGDMEEIEKILRQLRALLLVLQVMLSARETGDPEFKEMAKQLFEKLVEAIQRGDMEEIRKILLQLEALLLVLQVMKSARETGDPEFKEMAKQLFEKLVEAIQRGDEEEIQKILELLYRLLLRLQRM

SEQ ID NO: 252 - protein, 228 aa, synthetic construct
  REGION 1..228: note = Synthetic
SIREKELFRLVFQLLLIALELGDEEAYKTAKEALQLLEEALRTGDEELLEKVKELIRQVRLMIEVIQLLEIAQRLGDEEATKTAKEALQLLIEARRTGDEELLEKVKELIRQVRLMIEVIQLLEIAQRLGDEEATKTAKEALQLLIEARRTGDEELLEKVKELIRQVRLMIEVIQLLEIAQRLGDEEATKTAKEALQLLIEARRTGDEELLHKVETLIQLVESLIEHS

SEQ ID NO: 253 - protein, 228 aa, synthetic construct
  REGION 1..228: note = Synthetic
DERIFRLFEEVKRLLEIAQRLGDEEATKTAKEAHQLLHEALRHGDEELLEKVKELIRQVRLMIEVIQLLEIAQRLGDEEATKTAKEALQLLIEARRTGDEELLEKVKELIRQVRLMIEVIQLLEIAQRLGDEEATKTAKEALQLLIEARRTGDEELLEKVKELIRQVRLMIEVIQLLEIAQRLGDEDATKYAKEALQLLIEARRTGDEELLRQVELLIKIVELLIRFS

SEQ ID NO: 254 - protein, 262 aa, synthetic construct
  REGION 1..262: note = Synthetic
DELLELLRHLASQVHLLALEALRFYRETGDERARELFEQAEQAIQEANKAFQSGDDEQIKKVLLLLLLIYLAFLVWKMAEEALRFYRETGDERARELFEQAEQAIQEANKAFQSGDDEQIKKVLLLLELIYLAFLVWKMAEEALRFYRETGDERARELFEQAEQAIQEANKAFQSGDDEQIEKVYRLLLLIYLAFLVWKMAEEALRFYRETGDEKARELFEQAEQAIQEANKAFQSGDDEQIEHVLEILRRILSQFEIWKRS

SEQ ID NO: 255 - protein, 233 aa, synthetic construct
  REGION 1..233: note = Synthetic
DEIERLELLAFVIVHSLELLAELLGDPETTRIARELLQKVIELTQNGDKEEIRKMIEIALLLLLAIEIVLRLLELAKQLGDPETTRIARELLQKVIELTQNGDKEEIRKMIEIALLLLLAIEIVQRLLELAKQLGDPETTRIARELLQKVIELTQNGDKEEIRKMIEIALLLLLAIEIVQRLLELAKQLGDPETTRIARELLQKVIELTQNGDLEKIKYLITEAQLLLLRIES

SEQ ID NO: 256 - protein, 233 aa, synthetic construct
  REGION 1..233: note = Synthetic
DEIEHLRLLAEIIVTNLERLAERLGDPETTRIARELLQKVIELTQNGDKEEIRKMIEIALLLLLAIEIVQRLLELAKQLGDPETTRIARELLQKVIELTQNGDKEEIRKMIEIALLLLLAIEIVQRLLELAKQLGDPETTRIARELLQKVIELTQNGDKEEIRKMIEIALLLLLAIEIVQRLLELAKQLGDPETTRIARELLQKVIELTQNGDLDQIRILILHAEILLLRIER

SEQ ID NO: 257 - protein, 237 aa, synthetic construct
  REGION 1..237: note = Synthetic
DDRLEHFLIQVFTLIYFVRFLARLLGDEELWESAQQLLETVERIERDSGEEALRQVKLIYFLAQVLYYIALVLYLAKRLGDEELWESAQQLLETVERILRDSGEEALRQVKLIYFLAQVLWYIALVLKLAKELGDEELWESAQQLLETVERILRDSGEEAERQVLLIYYLAQVLWYIALVLKLAKELGDEELWESAQQLLETVERILRDSGEEAHEQVIEIYVRAFRLFVRAESLKH

SEQ ID NO: 258 - protein, 222 aa, synthetic construct
  REGION 1..222: note = Synthetic
SRLEILFLLVETLLEAAHQLAEHAGDPKALELVERILEEALRALREGDEETLEQLLLFVLVILMLLLAFFFAQLAGDPKALELVERILEEALRALREGDDKTLLLLLLFVLVILLLLRAYLLAKQAGDPKALELVERILEEALRALREGDLRTLLILLLFVFVILLLLYAYHLAKKAGDPKALELVERILEEALRALREGDQETLLKLIQFVIHILAELYES

SEQ ID NO: 259 - protein, 222 aa, synthetic construct
  REGION 1..222: note = Synthetic
SEQERLFERVHNLLREAHRDAEQAGDPKALELVERILEEALRALREGDKETLEQLLLFVEVILMLLRAYEFAKQAGDPKALELVERILEEALRALREGDKETLEQLLLFVEVILMLLRAYQFAKQAGDPKALELVERILEEALRALREGDKETLKLLLLFVRVILNLLRAYQFAKQAGDPKALELVERILEEALRALREGDRETLTRLLELVAQILIRLESS

SEQ ID NO: 260 - protein, 222 aa, synthetic construct
  REGION 1..222: note = Synthetic
DELENLFQLVEVLLRLAHVLAEQAGDPKALELVERILEEALRALREGDKETLEQLLLFVEVIRMLLEAYQFAKQAGDPKALELVERILEEALRALREGDKETLERLLLFVEVILMLLRAYQFAKQAGDPKALELVERILEEALRALREGDSETLLDLLLFVEVILMLLRAYQFAKQAGDPKALELVERILEEALRALREGDLETLARLLLLVLKILLKLREY

SEQ ID NO: 261 - protein, 222 aa, synthetic construct
  REGION 1..222: note = Synthetic
SEQEIRFREVEELLKEAYELAKQAGDPKALELVERILEEALRALREGDKETLEQLLLFVEVILMLLRAYQFAKQAGDPKALELVERILEEALRALREGDHTTLEQLLLFVEVILMLLRAYQFAKQAGDPKALELVERILEEALRALREGDSETLFNLLLFVLVILMLLRAYQHAKQAGDPKALELVERILEEALRALREGDIETLVRLLQIVVRILLELQRS

SEQ ID NO: 262 - protein, 193 aa, synthetic construct
  REGION 1..193: note = Synthetic
DESLHELIELRKRAREEGDEETYRRLEEVIHLIRLAELAMKLAKELGQPEYMESIQELFELAKQAFKEGDEETLRRLIEVVRLIILALLAMKLAKELGQPEYMESIQELFELAKQAFKEGDEETLRRLIEVVRLIILALLAMKLAKELGQPEYMESIQELFELAKQAFKEGDEETLRQLILIVTIIFLELLLL

SEQ ID NO: 263 - protein, 193 aa, synthetic construct
  REGION 1..193: note = Synthetic
DESLEELIKLYLRALREGDEETLRRLEEVLHLIRLALLAMKLAKELGQPEYMESIQELFELAKQAFKEGDEETLRRLIEVVRLIILALLAMKLAKELGQPEYMESIQELFELAKQAFKEGDEETLRRLIEVVRLIILALLAMKLAKELGQPEYMESIQELFELAKQAFKEGDDELLQRLLLEVHLIIQRLLKM

SEQ ID NO: 264 - protein, 218 aa, synthetic construct
  REGION 1..218: note = Synthetic
SDELRLRLLLEEVFRLAEEAGQEEILKQARELLELVIKAFREGDDEKIQRVFETAKLMFQLLQVLKLAEEAGQEEILKQARELLELVIKAFREGDEEKIRRVFETAKLMFQLLQVLKLAEEAGQEEILKQARELLELVIKAFREGDEEKIQRVFLTAKLMFQLLQVLKLAEEAGQEEILKQARELLELVIKAFREGDERKIFHVYQTARRMFRRLQKL

SEQ ID NO: 265 - protein, 195 aa, synthetic construct
  REGION 1..195: note = Synthetic
EFHELLRLVIHLYKEALERGDEETLRKIETILEAIKLLLLALLLARKTGDPEFRELVERVFQQLKEAFERGDEETIQKILTIVRAIILLLLALLLARKTGDPEFRELVERVFQQLKEAFERGDEETIQKILTIVRAIILLLLALLLARKTGDPEFRELVERVFQQLKEAFERGDEETIQRILLLVKYIVTELRLL

SEQ ID NO: 266 - protein, 249 aa, synthetic construct
  REGION 1..249: note = Synthetic
DQIERQFLEVYVFATYAILLAHLAGQEELAKELQESLEKLEEMLRLAQAGDEEARRLFQILWQWVLVQAWAVLAFLLAKRAGQEELAKELQESLEKLEEMLRLAEAGDEEARRLFQILWQWVLVQAWAVIAFLLAKEAGQEELAKELQESLEKLEEMLRLAEAGDEEARRLFQILWQWVLVQAWAVIAFLLAKEAGQEELAKELQESLEKLEEMLRLAEAGDEEARRLFQILFRHVFHLALEVRLYLEL

SEQ ID NO: 267 - protein, 155 aa, synthetic construct
  REGION 1..155: note = Synthetic
DEEEQVHAAILHVMVLASRAGDEELWQIALKLLRLLEAGKLDAEELELLVRVAFYIAEVMILAKQAGDEELWQIALKLLRLLEAGKLDAEELLLLVRVAFYIAEVMILAKQAGDEELWQIALKLLRLLEAGKLDAEELLRLVRRAYYIALQVVLS

SEQ ID NO: 268 - protein, 237 aa, synthetic construct
  REGION 1..237: note = Synthetic
SLELLELLLRVEVHITLVRILAKELGDEELWESAQQLLETVERILRDSGEEALRQVKLIYFLAQVLNYIALVLLLAKELGDEELWESAQQLLETVERILRDSGEEALRQVKLIYFLAQVLWYIALVLKLAKELGDEELWESAQQLLETVERILRDSGEEAKRQVLLIYLLAQVLWYIALVLKLAKELGDEELWESAQQLLETVERILRDSGEEALRQVHRIYIEAQILWLEALELKS

SEQ ID NO: 269 - protein, 276 aa, synthetic construct
  REGION 1..276: note = Synthetic
DEFERYLESAFVLAFIVHILARRIEEQGDLEAAKLLLIVARNLRELLVQLEESLKQGDEEYARLAEFLMYLASAAVYAALVFLLAKLIERNGDLEAAKLLLIVARNLAELLVQLAESLKQGDEEYARLAEFLMYLASAAVYAALVFLLALQIERQGDLEAAKLLLIVARNLAELLVQLAESLKQGDEEYARLARFLFYLASAAVFAALVFLLAKQIEEQGDLEAAKLLLIVARNLAELLVQLAESLKQGDEEYARLAIELYYEAVRAALTAELILS

SEQ ID NO: 270 - protein, 249 aa, synthetic construct
  REGION 1..249: note = Synthetic
DEELETEQLAVQARLIILEIEVLAKRTGDPKARELARLLLEFIKEILEMIKEGSEEARQLLETIFTAARAVLLIVLIYLYAQQTGDPKARELARLLLEFIKEILEMIKEGSEEARQLLETIFTAARAVLLIVLIYLYAQQTGDPKARELARLLLEFIKEILEMIKEGSEEARQLLETIFTAARAVLLIVLIYLYAQQTGDPKARELARLLLEFIKEILEMIKEGSEEARQLLRHIFTKAREVLLRVRHS

SEQ ID NO: 271 - protein, 277 aa, synthetic construct
  REGION 1..277: note = Synthetic
DEEEELILEVRILILRVKRLARRIKQQGNEEAARSVSELARLLLEIAKELIEQSKTGDEEAKQQLEILLLIAEVVLLIALVMILAYRIKQQGNEEAARSVSELARLLLEIAKELIEQSKTGDEEAKQQLEILLLIAEVVLLIALVMILAYRIKQQGNEEAARSVSELARLLLEIAKELIEQSKTGDEEAKQQLEILLLIAEVVLLIALVMILAYRIKQQGNEEAARSVSELARLLLEIAKELIEQSKTGDEEAKEQLRELLYEARRVLEFAEQMIRR

SEQ ID NO: 272 - protein, 277 aa, synthetic construct
  REGION 1..277: note = Synthetic
SEIEELIVRVFRLINLVEALALQIKLLGNEEAARSVSELARLLLEIAKELIEQSKTGDEEAKQQLEILLLIAEVVLLIALVMILAYRIKQQGNEEAARSVSELARLLLEIAKELIEQSKTGDEEAKQQLEILLLIAEVVLLIALVMILAYRIKQQGNEEAARSVSELARLLLEIAKELIEQSKTGDEEAKQQLEILLLIAEVVLLIALVMILAYRIKQQGNEEAARSVSELARLLLEIAKELIEQSKTGDEEAKQQLEELLRLARYVLLYALLLLNS

SEQ ID NO: 273 - protein, 277 aa, synthetic construct
  REGION 1..277: note = Synthetic
DEIRDLILRVEFLIQLVELLAELIKQNGNEEAARSVSELARLLLEIAKELKEQSKTGDEEAKQQLEILLLIAEVVLLIALVMLLANQIKQQGNEEAARSVSELARLLLEIAKELIEQSKTGDEEAKQQLEILLLIAEVVLLIALVMILAYRIKQQGNEEAARSVSELARLLLEIAKELIEQSKTGDEEAKEQLEILLLIAEVVLLIALVMILAYRIKQQGNEEAARSVSELARLLLEIAKELIEQSKTGDEEAKRQLNELYILALRVLLFAREMIKD

SEQ ID NO: 274 - protein, 277 aa, synthetic construct
  REGION 1..277: note = Synthetic
DEDEYIITHVRNLIRLVEINAKIIKKQGNEEAARSVSELARLLLEIAKELIEQSKTGDEEAKQQLEILLLIAEVVLLIAHVMLLAYRIKQQGNEEAARSVSELARLLLEIAKELIEQSKTGDEEAKQQLEILLLIAEVVLLIALVMILAYRIKQQGNEEAARSVSELARLLLEIAKELIEQSKTGDEEAKEQLEILLLIAEVVLLIALVMILAYRIKQQGNEEAARSVSELARLLLEIAKELIEQSKTGDEEAKRQLLELLKRAREVLRIALVMILA

SEQ ID NO: 275 - protein, 277 aa, synthetic construct
  REGION 1..277: note = Synthetic
DEIHVLILRVEALIRQVEILAKRIKQQGNEEAARSVSELARLLLEIAKELIEQSKTGDEEAKQQLEILLLIAEVVLLIALVMILAYRIKQQGNEEAARSVSELARLLLEIAKELIEQSKTGDEEAKQQLEILLLIAEVVLLIALVMILAYRIKQQGNEEAARSVSELARLLLEIAKELIEQSKTGDEEAKQQLEILLLIAEVVLLIALVMILAYRIKQQGNEEAARSVSELARLLLEIAKELIEQSKTGDKEARRLLQRLLTEARLVLEEALEMILA

SEQ ID NO: 276 - protein, 209 aa, synthetic construct
  REGION 1..209: note = Synthetic
SELEHLLTRIFYLASEIRLNATSEEQQQQARELMEKLLEAVEMGDPKKVQLLLLAAEIILLAIRIIRNATSEEQQQQARELMEKLLEAVEMGDPKKVQLLLLAAEIILLAIRIIRNATSEEQQQQARELMEKLLEAVEMGDPKKVQLLLLAAEIILLAIRIIRNATSEEQQQQARELMEKLLEAVEMGDPKKVHQILLEALEILLRIEH

SEQ ID NO: 277 - protein, 158 aa, synthetic construct
  REGION 1..158: note = Synthetic
SHLEEFVLYAEFMRQLVKLAGDEEQFRLVKELFERALRALQEGDEETLRLLEYVLLALLMLIRVKDAGDEEQFRLVKELFERALRALQEGDKKTLLLLYFVLLALEMLILVKKAGDEEQFRLVKELFERALRALQEGDEETLKRLSELLNRLKLEILQ

SEQ ID NO: 278 - protein, 218 aa, synthetic construct
  REGION 1..218: note = Synthetic
DEQEKKLLHLALLVHRYAEQATSPEQTELARKLVELARQALQKGDLEEIKRIQQMLKLIILAIRVLQYAEQATSPEQTELARKLVELALQALERGDLEEIKRIQQMLKLIILAIRVLQYAEQATSPEQTELARKLVELALQALERGDLEEIKRIQQMLKLIILAIRVLQYAEQATSPDLRRLARHLVELALQALERGDLEEIKRIQRRLETIIELIRT

SEQ ID NO: 279 - protein, 222 aa, synthetic construct
  REGION 1..222: note = Synthetic
DEILEILLRVEFIIKLIKYYAKQLGDPEIWEQARQLSEVMQQVLEEGDKEKAEIILILALVLLIIIRILKDAKALGDPEIWEQARQLSEVMQQVLEEGDKEKAEIILILALVLLIIIRILKDAKALGDPEIWEQARQLSEVMQQVLEEGDKEKAEIILILALVLLIIIRILKDAKALGDPEIWEQARQLSEVMQQVLEEGDKHKAHRILQRALELLLRIEEL

SEQ ID NO: 280 - protein, 218 aa, synthetic construct
  REGION 1..218: note = Synthetic
DELELELLRLARLVRRYAQESGDPEDIELARKLFELAIRALQAGDEEQIRKIQLMLKLIILAVQVLEYAQESGDPEDIELARKLWELAIRALQAGDEEQIRKIQLMLKLIILAVQVLEYAQESGDPEDIELARKLWELAIRALQAGDEEQIRKIQLMLKLIILAVQVLEYAQESGDPEDIETARKLWELAIRALQAGDEKQIKRIILQLLAIILFVQS

SEQ ID NO: 281 - protein, 218 aa, synthetic construct
  REGION 1..218: note = Synthetic
DELEKKLLELIIELRFLLKRATDPEIQELMQQAIELLIEVFRRGDEEELRKAYLLARLAILVFQLKELLKRATDPEIQELMQQAIELLIEVFRRGDEEELRKAYLLARLAILVFQLKELLKRATDPEIQELMQQAIELLIEVFRRGDEEELRKAYLLARLAILVFQLKELLKRATDPRLQELMQQAIELLIEVFRRGDEKELLYAYLYAELAITLFQH

SEQ ID NO: 282 - protein, 207 aa, synthetic construct
  REGION 1..207: note = Synthetic
SITELFTRILRQFEEALREGDEEKLREMLLLAELVETALEVHQTAQRLKEQGDYEIAELAERIVQQLLEASQEGDEEKLREMLLLAELVLTAAEVSETARKLKKQGDYEIAELAERIVQQLLEASQEGDEEKLREMLLLAELVLTAAEVSETARKLKKQGDYEIAELAERIVQQLLEASQEGDEEKLREMKRLARQVLLLAEYSEVH

SEQ ID NO: 283 - protein, 207 aa, synthetic construct
  REGION 1..207: note = Synthetic
DIDELFLRIRRQLSQAKREGDEEKLREMLLLAELVLTAEEVSETARKLKKQGDYEIAELAERIVQQLLEASQEGDEEKLREMLLLAELVLTAAEVSETARKLKKQGDYEIAELAERIVQQLLEASQEGDEEKLREMLLLAELVLTAAEVSETARKLKKQGDYEIAELAERIVQQLLEASQEGDEEKLRRMKRLARQVLLQAEHSEIH

SEQ ID NO: 284 - protein, 219 aa, synthetic construct
  REGION 1..219: note = Synthetic
DTEANEARAIILALEYLARQLGDPELLETVQQLLEELQRAQEEGDEKKLRFILLAVQALFIIILLFLFALKLGDPELLETVQQLLEELQRAQEEGDEKKLEFILLAVQALLIIILLWELAKRLGDPELLETVQQLLEELQRAQEEGDKRKLVFILLAVQALLIIILLWELAKRLGDPELLETVQQLLEELQRAQEEGDLEKLARIYVRVLELYVRIQEW

SEQ ID NO: 285 - protein, 219 aa, synthetic construct
  REGION 1..219: note = Synthetic
DTLEIELHYLAELAEHLARLLGNEEFLEIIKELFELMVRASRAGDDEKLKQIQLLIELVILALKAYELAQELGNEEFLEIIKELFELMVRASRAGDDRKLRFIQLLIELVILALLAYKLAQELGNEEFLEIIKELFELMVRASRAGDSRKLFLIRLLIELVILALLAYKLAQELGNEEFLEIIKELFELMVRASRAGDEQKLEQILHLILKVIIELEEL

SEQ ID NO: 286 - protein, 219 aa, synthetic construct
  REGION 1..219: note = Synthetic
DELEIELRLLAQEAEHLARLLGNEEFLEIIKELFELMVRASRAGDDEKLKQIQLLIELVILALRAYHLAQELGNEEFLEIIKELFELMVRASRAGDDEKLKQIQLLIELVILALLAYKLAQELGNEEFLEIIKELFELMVRASRAGDDEKLKQIKLLIRLVILALLAYKLAQELGNEEFLEIIKELFELMVRASRAGDDEKLKHILELILRVILRLELS

SEQ ID NO: 287 - protein, 229 aa, synthetic construct
  REGION 1..229: note = Synthetic
DELETKALELLLRAEVLARLSQDDSELMQEIIRQLAEKVVRIIEAGDDEKLEQLILSILAIILLLQALILAKESQDDSELMQEIIRQLAEKVVRIIEAGDDEKLEQLILSILAIILLLQALILAKESQDDSELMQEIIRQLAEKVVRIIEAGDDEKLRQLELSIRAIILLLQALILAKESQDDSELSQEIIRQLAEKVVRIIEAGDDKKLKRLLAEIYRVIYYLRLLIS

SEQ ID NO: 288 - protein, 218 aa, synthetic construct
  REGION 1..218: note = Synthetic
DELEELLAEAHLLMYRAEFFAKILGNPEVYEIARQLLQRLKEAQNLSEEEIELIVLLASAILLMVLALFFALHLGNPEVYEIARQLLQRLKEAQNLSEEEIELIVLLASAILLMVLALYYALRLGNPEVYEIARQLLQRLKEAQNLSEEEIELIVLLALAILLMVLALKYAKELGNPEVYEIARQLLQRLKEAQNLSEEEIRKIVQLALEILTEVRIL

SEQ ID NO: 289 - protein, 218 aa, synthetic construct
  REGION 1..218: note = Synthetic
DELEQLLLRAHVLMRQAEYLAKRLGNPEVYEIARQLLQRLKEAQNLSEEEIELIVLLASAILLMVQALLFALSLGNPEVYEIARQLLQRLKEAQNLSEEEIELIVLLASAILLMVLALQYAKELGNPEVYEIARQLLQRLKEAQNLSEEEIKLIVLLAIAILLMVLALKYAKELGNPEVYEIARQLLQRLKEAQNLSEEEIIEIVLLAFRILLHVRNL

SEQ ID NO: 290 - protein, 222 aa, synthetic construct
  REGION 1..222: note = Synthetic
DEIEEILTKVLSVIYEIKVRARLLGDPEIWEQARQLSEVAQQVLEEGDKEKAEIILILALVLLIIIRILFDAKRLGDPEIWEQARQLSEVMQQVLEEGDKEKAEIILILALVLLIIIRILKDAKALGDPEIWEQARQLSEVMQQVLEEGDKEKAEIILILALVLLIIIRILKDAKALGDPEIWEQARQLSEVMQQVLEEGDKEKAHQILQLALELLLHIQRL

SEQ ID NO: 291 - protein, 225 aa, synthetic construct
  REGION 1..225: note = Synthetic
DELERLLLEAHLLMHQVELIARLTGDPEILEIARELLELLKQVSKSGDEEEIRLIVLLAQAAVFMAEVYYIALITGDPEILEIARELLELLKQVSKSGDEEEIRLIVLLAQAAWFMAEVYLIAKQTGDPEILEIARELLELLKQVSKSGDEEEIRLIVNLARAAWLMAEVYLIAKQTGDPEILEIARELLELLKQVSKSGDKEEILRIVVLASKAFAEAEHVLLR

SEQ ID NO: 292 - protein, 246 aa, synthetic construct
  REGION 1..246: note = Synthetic
DELLHRAHILMYSAFLIAERLKRKDEEAAQKISELVQELLERLKEVTKSGDEEEIRLIVLLAQALHFMAEAFEIAERLKRKDEEAAQKISELVQELLERLKEVTKSGDEEEIRLIVLLAQALWFMAQAFEIAERLKRKDEEAAQKISELVQELLERLKEVTKSGDEEEIRLIVLLARALWFMAQAFEIAERLKRKDEEAAQKISELVQELLERLKEVTKSGDEEEIHRIVHLALELFNRAELIEFS

SEQ ID NO: 293 - protein, 224 aa, synthetic construct
  REGION 1..224: note = Synthetic
SELEHLLIEAENNIRLAEHLARLAGQPEFLEMAQRLLQRLQEATESGDEEEIKLVVLLAQAIYFIVRAYLLAKRAGQPEFLEMAQRLLQRLQEATESGDEEEIKLVVLLAQAIYFIVTAYRLAKEAGQPEFLEMAQRLLQRLQEATESGDKREIYLVVLLARAIYFIVTAYRLAKEAGQPEFLEMAQRLLQRLQEATESGDSHEIVRVVSLAIEIFNIVEYVRS

SEQ ID NO: 294 - protein, 224 aa, synthetic construct
  REGION 1..224: note = Synthetic
DELELLLAEAKFLISKAHKLAKEAGQPEFLEMAQRLLQRLQEATESGDEEEIKLVVLLAQAIYFIVTAYRLAKEAGQPEFLEMAQRLLQRLQEATESGDEEEIKLVVLLAQAIYFIVTAYRLAKEAGQPEFLEMAQRLLQRLQEATESGDEHEIRLVVLLAQAIYFIVTAYRLAKEAGQPENLEKAQRLLQRLQEATESGDHEEILKVVFLARFIFYLVKDIRL

SEQ ID NO: 295 - protein, 207 aa, synthetic construct
  REGION 1..207: note = Synthetic
ELRELLRELLELYLELLERGDEEKLRQIFRELELISLMLRIAELALKAKQMGQYELFELARELVERLSELWKRGDERKLKQIFRELQLISTMIEIAELALKAKQMGQYELFELARELVERLSELWKRGDEEKLSRIFYELQLISTMIEIAELALKAKQMGQYELFELARELVERLSELWKRGDYHKLFEIFLLLQKISRMIEIAEEA

SEQ ID NO: 296 - protein, 265 aa, synthetic construct
  REGION 1..265: note = Synthetic
DTEIRARELVLQIKLIAEEIEHQGDKEAAQKMKEIFEQARELIQEAEEIYRKTGSYEWLEFVFTLIRALYLVVQILFIATRIEKQGDKEAAQKMKEIFEQARELIQEAEEIYRKTGSYEWLEFVFTLIRALYLVVQILEIATRIEKQGDKEAAQKMKEIFEQARELIQEAEEIYRKTGSYEWLEFVFTLIRALYLVVQILEIATRIEKQGDKEAAQKMKEIFEQARELIQEAEEIYRKTGSYEWLRKVYRLIYELYFRVRILEES

SEQ ID NO: 297 - protein, 222 aa, synthetic construct
  REGION 1..222: note = Synthetic
DELETRIRTLLILARLLAERTGDPELLEVVRFLLEQILQAEETGDEEELKRVFLLAQIIYLLIHAWSMAKKTGDPELLEVVRFLLEQILQAEETGDEEELHRVFLLAQIIYLLIQAWSMAKKTGDPELLEVVRFLLEQILQAEETGDERELLRVLLLAEIIYLLIQAWSMAKKTGDPELLEVVRFLLEQILQAEETGDHRELLRVYLLAREIYLLIQQWSKS

SEQ ID NO: 298 - protein, 222 aa, synthetic construct
  REGION 1..222: note = Synthetic
SELEKEIRFLLYAAKFLAELTGDPELLEVVRFLLEQILQAEETGDEEELKRVFLLAQIIFLLIIAWSTAKNTGDPELLEVVRFLLEQILQAEETGDRQELLRVLLLAEIIYLLILAWYMAKKTGDPELLEVVRFLLEQILQAEETGDLRELFRVHLLALIIYLLIQAWSLAKRTGDPELLEVVRFLLEQILQAEETGDHRELLRVFSLALEIYLHILLHHLS

SEQ ID NO: 299 - protein, 222 aa, synthetic construct
  REGION 1..222: note = Synthetic
DELEYLLHEIRLILFEMRILAKRAGDPELIEIIQLILEKILEAIRAGDEEKIRKVFLLAQIALLLIKMVILAQEAGDPELIEIIQLILEKILEAIRAGDEEKIRKVFLLAQIALLLIKMVILAQEAGDPELIEIIQLILEKILEAIRAGDEEKIRKVFLLAQIALLLIKMVILAQEAGDPELIEIIQLILEKILEAIRAGDEEKIRRVFYLALEALLFIELH

SEQ ID NO: 300 - protein, 222 aa, synthetic construct
  REGION 1..222: note = Synthetic
DEKEHLKTHIEALLQYMRVLAESAGDPELIEIIQLILEKILEARRAGDEEKIRKVFLLAQIALLLIEMVILALLAGDPELIEIIQLILEKILEAIRAGDEEKIRKVFLLAQIALLLIKMVILAQEAGDPELIEIIQLILEKILEAIRAGDEEKIRKVFLLAQIALLLIKMVILAQEAGDPELIEIIQLILEKILEAIRAGDRHKINEVYLLAIRALLFIREV

SEQ ID NO: 301 - protein, 222 aa, synthetic construct
  REGION 1..222: note = Synthetic
DQFEFILLRVELTILQIKFLAKRLGDPEIWEQARQLSEVMQQVLEEGDEEKAEIILILALVLYIIILILYLAKLLGDPEIWEQARQLSEVMQQVLEEGDKRKALIILTLALVLLIIIEILLDARRLGDPEIWEQARQLSEVMQQVLEEGDLEKARIILILALVLLIIIRILKDAKALGDPEIWEQARQLSEVMQQVLEEGDLHKALQILAEALYLLIHIERL

SEQ ID NO: 302 - protein, 219 aa, synthetic construct
  REGION 1..219: note = Synthetic
DELEFRARELAYIIRLLAELTGDEESLKIVEEAFQLVVQILETGDLEKIRLVLLLLSAIMLALIIIYLARKTGDEESLKIVEEAFQLVVQILETGDLEKIRLVLLLLSAIMLALIIIELARKTGDEESLKIVEEAFQLVVQILETGDLEKIRLVLLLLSAIMLALIIIELARKTGDEESLKIVEEAFQLVVQILETGDKHKILEVYLLLLRIMYKLRLS

SEQ ID NO: 303 - protein, 222 aa, synthetic construct
  REGION 1..222: note = Synthetic
DDLEVLLAQAESIIFELRSIAKEAGSPELLQLVKEILEEFQRALESGDKEEIEKVLMLVKAALIIARLFLIAKQAGSPELLQLVKEILEEFQRALESGDKEEIEKVLMLVKAALIIARLFLIAKQAGSPELLQLVKEILEEFQRALESGDKEEIEKVLMLVKAALIIARLFLIAKQAGSPELLQLVKEILEEFQRALESGDKEEIRRVLLLVKKALLHAEIS

SEQ ID NO: 304 - protein, 222 aa, synthetic construct
  REGION 1..222: note = Synthetic
DEEEFMLNEAEAIIHLLELIARLAGSPELLQLVKEILEEFQRALESGDKEEIEKVLMLVKAALIIAELFFIAVVAGSPELLQLVKEILEEFQRALESGDKEEIEKVLMLVKAALIIARLFLIAKQAGSPELLQLVKEILEEFQRALESGDKREIKKVLLLVKAALIIARLFLIAKQAGSPELLQLVKEILEEFQRALESGDYREILRVLFIVIEALYEAEEF

SEQ ID NO: 305 - protein, 222 aa, synthetic construct
  REGION 1..222: note = Synthetic
DEKEQMLDEARLIIELLFHIARRAGSPELLQLVKEILEEFQRALESGDKEEIEKVLMLVKAALIIARLFEIAKRAGSPELLQLVKEILEEFQRALESGDKEEIEKVLMLVKAALIIARLFLIAKQAGSPELLQLVKEILEEFQRALESGDKHEIRKVLNLVLAALIIARLFLIAKQAGSPELLQLVKEILEEFQRALESGDYEEIIRVLSIVFEALLRAELF

SEQ ID NO: 306 - protein, 202 aa, synthetic construct
  REGION 1..202: note = Synthetic
DELEILASLARTILESIRRHADPEFKEMLQLVLELIKEALLNNDLELVQLAWFAALALLILLQIRRHADPEFKEMLQLVLELIKEALLNNDLELVRLAWFAALALLILLKIRRHADPEFKEMLQLVLELIKEALLNNDLRLVLLAWFAALALLILLKIRRHADPEFKEQLQLVLELIKEALLNNDLRLVLEAYILALVLLLS

SEQ ID NO: 307 - protein, 240 aa, synthetic construct
  REGION 1..240: note = Synthetic
SEVEEVIELLTKIVHFLLLARIAGLDEEKLRRILREAEELVEIVIKGSEEQSERAKRILEVLLLFAQIAFFLMQAQRAGLDEEKLQRILEEAEELVKIVKNGSEEQSERAKRILEVLLLFAQIAFFLMQAQRAGLDEEKLQRILEEAEELVKIVKNGSEEQSERAKRILEVLLLFAQIAFFLMQAQRAGLDEEKLQRILEEAEELVKIVKNGSEEQSERAKRILHRLLTFAQIAFYRLKS

SEQ ID NO: 308 - protein, 240 aa, synthetic construct
  REGION 1..240: note = Synthetic
KREEEVVHLLALIAYYLIFAQNAGLDEEKLQRILEEAQELVEIVRNGSEEQSERAKRILEVLLLFAQIAFFLMLAQRAGLDEEKLQRILEEAEELVKIVKNGSEEQSERAKRILEVLLLFAQIAFFLMQAQRAGLDEEKLQRILEEAEELVKIVKNGSEEQSERAKRILEVLLIFAQIAFFLMQAQRAGLDEEKLQRILEEAEELVKIVKNGSEEQSERAKRILEELLTFARSAFERSKS

SEQ ID NO: 309 - protein, 240 aa, synthetic construct
  REGION 1..240: note = Synthetic
SEETHVLRLLLEIEDFLRTAQRAGLDEEKLQRILEEAEELVKIVKNGSERESYRAILILEVLLLFARIASFLMQAQRAGLDEEKLQRILEEAEELVKIVKNGSEEQSERAKRILEVLLLFAQIAFFLMQAQRAGLDEEKLQRILEEAEELVKIVKNGSEEQSRRAKLILRVLLLFAQIAFFLMQAQRAGLDEEKLQRILEEAEELVKIVKNGSEEESARAVLRLEELLLFAQHAFRRLRA

SEQ ID NO: 310 - protein, 251 aa, synthetic construct
  REGION 1..251: note = Synthetic
SHELSELEDRIIQLLAQVRLLMEELGSPEARETAEQVYQTFQEAIESLQEGDEEKAKRSLELALIVAKIAYLLLLVIKLMRELGSPEARETAEQVYQTFQEAIESLQEGDEEKAKRSLELALIVAKIAYLLLLVIKLMRELGSPEARETAEQVYQTFQEAIESLQEGDEEKAKRSLELALIVAKIAYLLLLVIKLMRELGSPEARETAEQVYQFFQEAIESLQEGDEEKAKRSLEKALIFARIAFFFLQLL

SEQ ID NO: 311 - protein, 251 aa, synthetic construct
  REGION 1..251: note = Synthetic
STELLRIVIKIRSLLLLVELNARHLGSPEARETAEQVYQTFQEAIESLQEGDEEKAKRSLELALIVAKIAFLLLLVIELMRELGSPEARETAEQVYQTFQEAIESLQEGDEEKAKRSLELALIVAKIAYLLLLVIKLMRELGSPEARETAEQVYQTFQEAIESLQEGDEEKAKKSLELALIVAKIAYLLLLVIKLMRELGSPEARETAEQVYQTFQEAIESLQEGDLHKAYESLLKALVFAEIAYKRLLEI

SEQ ID NO: 312 - protein, 222 aa, synthetic construct
  REGION 1..222: note = Synthetic
SLLELILLLVEIIILQIKVLAKRLGDPEIWEQARQLSEVMQQVLEEGDEKKARIILILALVLLIIIYILFLAKLLGDPEIWEQARQLSEVMQQVLEEGDEEKARIILILALVLLIIIEILFDAEYLGDPEIEEQARQLSEVMQQVLEEGDRHKALIILILALVLLIIIRILKDAKELGDPEIWEQARQLSEVMQQVLEEGDHEKAIEILLEALRLLNEILQS

SEQ ID NO: 313 - protein, 251 aa, synthetic construct
  REGION 1..251: note = Synthetic
SDELRQLVLEIEILLLRVEQLMRELGSPEARETAEQVYQTFQEAIESLQEGDEEKAKRSLELALIVAKIAYLLLLVIKLMRELGSPEARETAEQVYQTFQEAIESLQEGDEEKAKRSLELALIVAKIAYLLLLVIKLMRELGSPEARETAEQVYQTFQEAIESLQEGDEEKAKRSLELALIVAKIAYLLLLVIKLMRELGSPEARETAEQVYQTFQEAIESLQEGDEKKAEFELLRALNFAKLAYIYLRLL

SEQ ID NO: 314 - protein, 251 aa, synthetic construct
  REGION 1..251: note = Synthetic
SEELLELEYRIELFLLLVEFLMRLLGSPEARETAEQVYQTFQEAIESLQEGDEEKAKRSLELALIVAKIAYLLLLVIILMRELGSPEARETAEQVYQTFQEAIESLQEGDEEKAKRSLELALIVAKIAYLLLLVIKLMRELGSPEARETAEQVYQTFQEAIESLQEGDEEKAKRSLELALIVAKIAYLLLLVIKLMRELGSPEARETAEQVYQTFQEAIESLQEGDEHKAFKDLLEALAFAYVAFEQLRDS

SEQ ID NO: 315 - protein, 251 aa, synthetic construct
  REGION 1..251: note = Synthetic
SEELRRIVLKIQEFLRLVEVLMEYLGSPEARETAEQVYQTFQEAIESLQEGDEEKAKRSLELALIVAKIAYLLLLVIILMLELGSPEARETAEQVYQTFQEAIESLQEGDEEKAKRSLELALIVAKIAYLLLLVIKLMRELGSPEARETAEQVYQTFQEAIESLQEGDEEKAKRSLELALIVAKIAYLLLLVIKLMRELGSPEARETAEQVYQTFQEAIESLQEGDEEKAYRSLLHALLFAIEAFHELRLI

SEQ ID NO: 316 - protein, 219 aa, synthetic construct
  REGION 1..219: note = Synthetic
DELLQRVTELVARLEYLARQLGDPEAIEAVERIREQARQVLETGDMEKAKKIYLLLRVLQLMLELLYLARRLGDPEAIEAVERIIEQAIQVLETGDMEKAKKIYLLLRVLQLMLLLLELARQLGDPEAIEAVERIIEQAIQVLETGDMEKAKKIYLLLLVLQLMLLLLELARQLGDPEAIEAVERIIEQAIQVLETGDMEKAHRIYLDLLRLLEHLLLL

SEQ ID NO: 317 - protein, 250 aa, synthetic construct
  REGION 1..250: note = Synthetic
DESEELLSHARALVYLARNLAEVAGDPRMIELAEQLLEELIKAFRTFVAGNTEEALEKLKSVILLLIALVLVLQAFLQAKIAGDPRMIELAEQLLEELIKAFRTFVAGNTEEALEKLHSVIQLLIALLLVLKAFLLAQQAGDPRMIELAEQLLEELIKAFRTFVAGNTEEAHKKLLSVLLLLEALLLVLKAFLLAQQAGDPRMIELAEQLLEELIKAFRTFVAGNVEEARQRLLQVLALLLELLTRLEEF

SEQ ID NO: 318 - protein, 199 aa, synthetic construct
  REGION 1..199: note = Synthetic
DEILQLLAEILHELLERGDQESLEQTLRVFEAILFAVRIFRQAKKSGASEELKQILKSLFEEIKRLLEEGDLESLLQTARVLYAIAYAVLIFVQAKKSGASEELKQILKSLFEEIKRLLEEGDLESLLQTARVLYAIAYAVLIFVQAKKSGASEELKQLLKSLFEEIKRLLEEGDLESLLQTAERLFILANYVLSQVLL

SEQ ID NO: 319 - protein, 216 aa, synthetic construct
  REGION 1..216: note = Synthetic
SEEERELTEMRIHLLKLHLTAQRLEELGNKEAAETLRRTVEEILELIKRFQNATTEEESQKAKERLQELLELVRMLLSLAELFRTAQQLKQLGNKEAAETLRRTVEEILELIKRFQNATTEEESQKAKERLQELLELVRMLLSLAELFRTAQQLKQLGNKEAAETLRRTVEEILELIKRFQNATTEEESQKAKERLERLLHLVKILLAEAELFESS

SEQ ID NO: 320 - protein, 216 aa, synthetic construct
  REGION 1..216: note = Synthetic
SEEEIELKRMEVDLELLHRVAEELKQLGNKEAAETLRRTVEEILELIKRFQNATTEEESQKAKERLQELLELVRMLLSLAELFRTAQQLKQLGNKEAAETLRRTVEEILELIKRFQNATTEEESHKAKKRLEELLELVRMLLSLAELFRTAQQLKQLGNKEAAETLRRTVEEILELIKRFQNATTREESRRAYERLLELLELVRHLLQLAERFRTA

SEQ ID NO: 321 - protein, 216 aa, synthetic construct
  REGION 1..216: note = Synthetic
DEEETELNEMLFVLKRLHKTAQQLKQLGNKEAAETLRRTVEEILELIKRFQNATTEEESQKAKERLQELLELVRMLLSLAELFRTAQQLKQLGNKEAAETLRRTVEEILELIKRFQNATTEEESQKAKERLQELLELVRMLLSLAELFRTAQQLKQLGNKEAAETLRRTVEEILELIKRFQNATTEEESEKAKQRLEQLFILVLLLLIQAEQYRRN

SEQ ID NO: 322 - protein, 216 aa, synthetic construct
  REGION 1..216: note = Synthetic
EADETLVRTLEEILELRRRFQNATTEEESQKAKERLQELEELLQMLLSLRELFETAQQLKQLGNKEAAETLRRTVEEILELIKRFQNATTEEESQKAKERLQELLELVRMLLSLAELFRTAQQLKQLGNKEAAETLRRTVEEILELIKRFQNATTEEESQKAKERLQELLELVELLLFLAQLFEHAQRHKQRGNKHLAELLKRVVEDILEQIKRFQ

SEQ ID NO: 323 - protein, 222 aa, synthetic construct
  REGION 1..222: note = Synthetic
DELEEMALKVELLLRLAHLRARRLGDPEYLRSVEEVLELLEQALRNNDEELVKLILMAAQVLILLIKAWRSAKQLGDPEYLRSVEEVLELLEQALRNNDEELVKLILMAAQVLILLIKAWRSAKQLGDPEYLRSVEEVLELLEQALRNNDEELVKLILMAAQVLILLIKAWRSAKQLGDPEYLRSVEEVLELLEQALRNNDEELVHRILLLAQRLRLDIQHS

SEQ ID NO: 324 - protein, 247 aa, synthetic construct
  REGION 1..247: note = Synthetic
SSELRVEAHYLFLVLELLLERARTPELREAAQIALELAIELMRIVLNGSEEEIKQAVEKLELLVKALQLLFTLYELLRQARTPELREAAQIALELAIELMRIVLNGSEEEIKQAVEKLELLVKALQLLFTLYELLRQARTPELREAAQIALELAIELMRIVLNGSEEEIKQAVEKLELLVKALQLLFTLYELLRQARTPELREAAQIALELAIELMRIVLNGSEHEIRHAVLHLEYLVRELEEKFRS

SEQ ID NO: 325 - protein, 207 aa, synthetic construct
  REGION 1..207: note = Synthetic
DIERVQVEAILLAVETLARFAGDPEAVEAVKELLQELKRATDAEEIRSLLLFARVLFLLLQVLLLARHAGDPEAVEAVKELLQELKRATDAEEIRSLLLFARVLLLLLQVLEMARQAGDPEAVEAVKELLQELKRATDAEEILHLLLFALVLLLLLQVLEMARQAGDPEAVEAVKELLQELKRATDVREILRLFSYALELLFKLHRS

SEQ ID NO: 326 - protein, 266 aa, synthetic construct
  REGION 1..266: note = Synthetic
DLEEQETRFLMILVRLLIRLVEISAREAGDEEALEAARQLLERLQEALERAASSDEEDFKRAEQIIRTLLLMVKVLLYILKVLLHAKEAGDEEALEAARQLLERLQEALERAASSDQRDYFRAELIIRTLLLMVKVLLYILLVLKHAKEAGDEEALEAARQLLERLQEALERAASSDSRDFYRALLIIRTLLLMVKVLLYILLVLKHAKEAGDEEALEAARQLLERLQEALERAASSDRRDFLEAIRIILELLLLVFELLTELQHS

SEQ ID NO: 327 - protein, 266 aa, synthetic construct
  REGION 1..266: note = Synthetic
SEQETETRQLMIKVESLIKLVEDNARHAGDEEALEAARQLLERLQEALERAASSDEEDFKRAEQIIRTLLLMVKVLLYILLVLLHAKEAGDEEALEAARQLLERLQEALERAASSDEEDFKRAEQIIRTLLLMVKVLLYILLVLKHAKEAGDEEALEAARQLLERLQEALERAASSDEEDFKRAEQIIRTLLLMVKVLLYILLVLKHAKEAGDEEALEAARQLLERLQEALERAASSDEEDFKEAIRIILELLTLVILLLLKLRLS

SEQ ID NO: 328 - protein, 266 aa, synthetic construct
  REGION 1..266: note = Synthetic
SEQETETKRLMTKVESFIQLVEIDAEHAGDEEALEAARQLLERLQEALERAASSDEEDFKRAEQIIRTLLLMVKVLLYILLVLLHAKEAGDEEALEAARQLLERLQEALERAASSDEEDFKRAEQIIRTLLLMVKVLLYILLVLKHAKEAGDEEALEAARQLLERLQEALERAASSDEEDFKRAEQIIRTLLLMVKVLLYILLVLKHAKEAGDEEALEAARQLLERLQEALERAASSDEEDFKRAEEIIRRLLLLVIQLLLELRFS

SEQ ID NO: 329 - protein, 266 aa, synthetic construct
  REGION 1..266: note = Synthetic
NEEEIETEFLMQEVRVFIQLVEQLARQAGDEEALEAARQLLERLQEALERAASSDEEDFKRAEQIIRTLLLMVKVLLYILRVLLHAKRAGDEEALEAARQLLERLQEALERAASSDERDFKQAENIIRTLLLMVKVLLYILLVLKHAKEAGDEEALEAARQLLERLQEALERAASSDDEDFRRALEIIRTLLLMVKVLLYILLVLKHAKEAGDEEALEAARQLLERLQEALERAASSDEEDFKEALRIIAELLFLVEKLLYHLEEL

SEQ ID NO: 330 - protein, 261 aa, synthetic construct
  REGION 1..261: note = Synthetic
SEEELRIREIAHRIEIAVELLEELAKEEGDPRMVELAQKILEEVLRLLETVKEDKDHREEALENLQILLIAIQIALLVTELLRLAKQEGDPRMVELAQKILEEVLRLLETVKEDKDHREEALENLQILLIAIQIAILVTELLRLAKQEGDPRMVELAQKILEEVLRLLETVKEDKDHREEALINLQILLIAIQIAILVTELLRLAKQEGDPRMVELAQKILEEVLRLLETVKEDKDHRYEAFFILLLLLTRIKRAIRVTEL

SEQ ID NO: 331 - protein, 265 aa, synthetic construct
  REGION 1..265: note = Synthetic
DEKQLEVLLTVELIEELVYRLLRLAQQEGDPRLLEAAKRALESALEMLERVQSGDEETFEKAQKQLEVLLTVLLILILVTELLRLAQEEGDPRLLEAAKRALESALEMLERVQSGDEETFEKAQKQLEVLLTVLLILILVTELLRLAQQEGDPRLLEAAKRALESALEMLERVQSGDEETFEKAQKQLYVLLIVLLILILVTELLRLAQQEGDPRLLEAAKRALESALEMLERVQSGDEETFRKALEILIRLLHHLRILIEITRS

SEQ ID NO: 332 - protein, 265 aa, synthetic construct
  REGION 1..265: note = Synthetic
DQKQEEVLRTVLRILALVHFLLTLAQEEGDPRLLEAAKRALESALEMEERVRSGDEETFEKAQKQLEVLLTVLLILILVTKLLRLAQQEGDPRLLEAAKRALESALEMLERVQSGDEETFEKAQKQLEVLLTVLLILILVTELLRLAQQEGDPRLLEAAKRALESALEMLERVQSGDEETFEKAKKQLEVLLTVLLILILVTELLRLAQQEGDPRLLEAAKRALESALEMLERVQSGDEETFRKAYEHLLRLLNHLRVLIRTTEL

SEQ ID NO: 333 - protein, 219 aa, synthetic construct
  REGION 1..219: note = Synthetic
DDQYIEAEVILRYAEFLARRLGNEEFMEIVRRLLKELIQATQRGDEEKVRSLLQMALAVLILLKAYQLAKELGNEEFMEIVRRLLKELIQATQRGDEEKVRSLLQMALAVLILLEAYRLAKELGNEEFMEIVRRLLKELIQATQRGDEEKVRSLLLMALAVLILLEAYRLAKELGNEEFMEIVRRLLKELIQATQRGDEEKVRELLLLAFEVLLRLRHS

SEQ ID NO: 334 - protein, 222 aa, synthetic construct
  REGION 1..222: note = Synthetic
DRLEILALRVKELLEKAWRSAKQLGDPEYLRSVEEVLELLEQALRNNDEELVKLILMAAQVLILLIKAWRSAKQLGDPEYLRSVEEVLELLEQALRNNDEELVKLILMAAQVLILLIKAWRSAKQLGDPEYLRSVEEVLELLEQALRNNDEELVKLILMAAQVLILLIKAWRSAKQLGDPEYLRSVEEVLELLEQALRNNDEKLVKVILIRAYLLVAELEHH

SEQ ID NO: 335 - protein, 219 aa, synthetic construct
  REGION 1..219: note = Synthetic
DLEMQRARHILHLAHLLARELGNEEFMEIVRRLLKELIQATQRGDEEKVRSLLQMALAVLILLEAFLKAKELGNEEFMEIVRRLLKELIQATQRGDEKLVYILLLMALAVLILLKAYRLAKELGNEEFMEIVRRLLKELIQATQRGDAELVVTLLLMAIAVLILLEAYRLAKELGNEEFMEIVRRLLKELIQATQRGDHRLVAQLLSLAQRVLVQLLLS

SEQ ID NO: 336 - protein, 224 aa, synthetic construct
  REGION 1..224: note = Synthetic
DHQEFLMKEAHLTAELVRQLAKHMGDEELSEAAKRLIQELIRLLQEGDKEKIEQVYTMVSALLLAAEVLRLAKEMGDEELSEAAKRLIQELIRLLQEGDKEKIEQVYTMVSALLLAAEVLRLAKEMGDEELSEAAKRLIQELIRLLQEGDEKKIRQVYTMVSALLLAAEVLRLAKEMGDEELSEAAKRLIQELIRLLQEGDKEKILQVYLRVERLLEAAEELRR

SEQ ID NO: 337 - protein, 222 aa, synthetic construct
  REGION 1..222: note = Synthetic
FKEILRRLIREYHEMHEILEKTGDERATEQLRIIYELLIAVYILEEAYEIAKQLGNEEFLEIVRRLLQELLEMLEILKKTGDERATEQLRIILELAEAVLILLEAYEIAKQLGNEEFLEIVRRLLQELLEMLEILKKTGDERATEQLRIILELAEAVLILLEAYEIAKQLGNEEFLEIVRRLLQELLEMLEILKKTGDERATEQLRQILLLAREVLVQLLLS

SEQ ID NO: 338 - protein, 241 aa, synthetic construct
  REGION 1..241: note = Synthetic
DQEEVELVELLAIALRVLHIVKRTGAGVEHAKRLFQLILEMIRLWQEYGDEEAKEEAKRLVELLQLIAIALEVLQTVKETGAGVEHAKRLFQLILEMIRLWQEYGDEEAKEEAKRLVELLQLIAIALEVLQTVKETGAGVEHAKRLFQLILEMIRLWQEYGDEEAKEEAKRLVELLQLIAIALEVLQTVKETGAGVEHAKRLFQLILEMIRLWQEYGDEEAKRRARELVFRLEYIAHQLKL

SEQ ID NO: 339 - protein, 241 aa, synthetic construct
  REGION 1..241: note = Synthetic
NEEEFELFELELIARRVLLYVRLFGAGVEHAKRLFQLILEMIRLWQEYGDEEAKEEAKRLVELLQLIAIALEVLRTVKETGAGVEHAKRLFQLILEMIRLWQEYGDEEAKEEAKRLVELLQLIAIALEVLQTVKETGAGVEHAKRLFQLILEMIRLWQEYGDEHAKEEAKRLVILLQLIAIALEVLQTVKETGAGVEHAKRLFQLILEMIRLWQEYGDDEALLRAIYLVLQLELIAHRLES

SEQ ID NO: 340 - protein, 253 aa, synthetic construct
  REGION 1..253: note = Synthetic
SEHEESLRQIVKALLIVVEVYYLALLAGDKTMLELAEEIRREIERILQLVQKYNDMEAVEQARSLAQIASAAYWVLRVWQLAKEAGDKTMLELAEEIIREIFRIFQLVKKYNDMEAVEQARSLAQIASAAYWVLRVWQLAKEAGDKTMLELAEEIIREIFRIFQLVKKYNDMEAVEQARSLAIIASAAYWVLRVWQLAKEAGDKTMLELAEEIIREIFRIFQLVKKYNDMEAVKKAEQLAHIARTAFYRLRIN

SEQ ID NO: 341 - protein, 293 aa, synthetic construct
  REGION 1..293: note = Synthetic
DEEEHETLRAEFLVQEIELLAKRLWRLTGDETAQQIFELARRILEEVKKMWEIVQNGSEEEIEEALERLKQLIETLLALLLVALILILAKELWEKTGDETAQQIFELARRILEEVKKMWEIVQNGSEEEIEEALERLKQLIETLLALLLVALILRLAKELWEKTGDETAQQIFELARRILEEVKKMWEIVQNGSEEEIEEALERLHQLITTLLALLLVALILRLAKELWEKTGDEKAQQIFELARRILEEVKKMWEIVQNGSEEEIEEAFQRLLHLIHELLYLLQLALRLRES

SEQ ID NO: 342 - protein, 266 aa, synthetic construct
  REGION 1..266: note = Synthetic
DEEHFRVLILVLEAFLIAYRVRKLAKELGDPESLETARQIQEELIELFQLFRTVSEEEMRKATERVKVLSLVLKALQLALLVLLLAKELGDPESLETARQIIEELIELFQLFRTVSEEEMRKATERVKVLSLVLKALQLALLVLLLAKELGDPESLETARQIIEELIELFQLFRTVSEEEMRKATERVKVLSLVLKALQLALLVLLLAKELGDPESLETARQIIEELIELFQLFRTVSEEEMRKATEIVRRLSHSLKILQEKLLEL

SEQ ID NO: 343 - protein, 266 aa, synthetic construct
  REGION 1..266: note = Synthetic
DEEEFEVRELVLHAERLALHVRRLAKELGDPESLETARQIIEELIELFQLFRTVSEEEMRKATERVKVLSLVLKALQLALLVLLLAKELGDPESLETARQIIEELIELFQLFRTVSEEEMRKATERVKVLSLVLKALQLALLVLLLAKELGDPESLETARQIIEELIELFQLFRTVSEEEMRKATERVKVLSLVLKALQLALLVLLLAKELGDPESLETARQIIEELIELFQLFRTVSEREMRKASEIVYLLSYILKELQLALLVL

SEQ ID NO: 344 - protein, 266 aa, synthetic construct
  REGION 1..266: note = Synthetic
DEEELKVEHLVLHARILALLVELLARELGDPESLETARQIIEELIELFQLFRTVSEEEMRKATERVKVLSLVLKALYLALKVLLLAKELGDPESLETARQIIEELIELFQLFRTVSEEEMRKATERVKVLSLVLKALQLALLVLLLAKELGDPESLETARQIIEELIELFQLFRTVSEEEMRKATERVEVLSLVLKALQLALLVLLLAKELGDPESLETARQIIEELIELFQLFRTVSEEEMREASLQVFLLSRILKELQRALLEL

SEQ ID NO: 345 - protein, 222 aa, synthetic construct
  REGION 1..222: note = Synthetic
ASIELLAEKIYRFILLVEFDARRLGDPKMLELAQELLELVRQALELGDEEKASIILLAVQILYYIILVVRFARELGDPKMLELAQELLELVRQALELGDEEKASIILLAVQILYYIILVVKFARELGDPKMLELAQELLELVRQALELGDEEKASIILLAVQILYYIILVVKFARELGDPKMLELAQELLELVRQALELGDEEKAHKILIRVRLLLNEILHS

SEQ ID NO: 346 - protein, 266 aa, synthetic construct
  REGION 1..266: note = Synthetic
DEEHIHVKQLVLHALRLALRVQQLAKELGDPESLETARQIIEELRELEQLFRTVSEEEMRKATERVKVLSLVLKALQLALLVLLLAKELGDPESLETARQIIEELIELFQLFRTVSEEEMRKATERVKVLSLVLKALQLALLVLLLAKELGDPESLETARQIIEELIELFQLFRTVSEEEMRKATERVKVLSLVLKALQLALLVLLLAKELGDPESLETARQIIEELIELFQLFRTVSEEEMRKATKEVERLSIELENLIRLLELS

SEQ ID NO: 347 - protein, 266 aa, synthetic construct
  REGION 1..266: note = Synthetic
SEEEEHVQRLVLRALYLAYLVRILAEILGDPESLETARQIIEELIELYQLFRTVSEEEMRKATERVKVLSLVLKALQLALLVLRLAKELGDPESLETARQIIEELIELFQLFRTVSEEEMRKATERVKVLSLVLKALQLALLVLLLAKELGDPESLETARQIIEELIELFQLFRTVSEEEMRKATERVKVLSLVLKALQLALLVLLLAKELGDPESLETARQIIEELIELFQLFRTVSEEEMRKATRRVFELSLELLRLFLQLEYD

SEQ ID NO: 348 - protein, 266 aa, synthetic construct
  REGION 1..266: note = Synthetic
DTEREKVEQLVLHALILAAIVLTFAHHLGDPESLETARQIREELEELFQLFRTVSEEEMRKATERVKVLSLVLKALELALLVLYLAKKLGDPESLETARQIIEELIELFQLFRTVSEEEMRKATERVKVLSLVLKALQLALLVLLLAKELGDPESLETARQIIEELIELFQLFRTVSEEEMRKATERVKVLSLVLKALQLALLVLLLAKELGDPESLETARQIIEELIELFQLFRTVSEEEMRKATERVRHLSYILLELQIRLENS

SEQ ID NO: 349 - protein, 266 aa, synthetic construct
  REGION 1..266: note = Synthetic
DEEELRVIELVFKAHILAYQVLVLARRLGDPESLETARQIIEELIELFQLFRTVSEEEMRKATERVKVLSLVLKALQLALLVLLLAKELGDPESLETARQIIEELIELFQLFRTVSEEEMRKATERVKVLSLVLKALQLALLVLLLAKELGDPESLETARQIIEELIELFQLFRTVSEEEMRKATERVKVLSLVLKALQLALLVLLLAKELGDPESLETARQIIEELIELFQLFRTVSEEEMRKATEKVERLSLILELLEKLLRLS

SEQ ID NO: 350 - protein, 266 aa, synthetic construct
  REGION 1..266: note = Synthetic
DEEELEVRALVLHALVLALLVRRLAKELGDPESLETARQIIEELIELFQLFRTVSEEEMRKATERVKVLSLVLKALYLALLVLLLAKELGDPESLETARQIIEELIELFQLFRTVSEEEMRKATERVKVLSLVLKALQLALLVLLLAKELGDPESLETARQIIEELIELFQLFRTVSEEEMRKATERVKVLSLVLKALQLALLVLLLAKELGDPESLETARQIIEELIELFQLFRTVSEQKADEAETTVRRLSRVLKALQEALLKL

SEQ ID NO: 351 - protein, 297 aa, synthetic construct
  REGION 1..297: note = Synthetic
DDLEHLYAEIYLVIVRALKVARELYKEAGDEEAKEIIKQLEEIVQLAYEMVQIYRTAKDEEEIRRAQEILELLLLFAEIVLIILKAILLALRLYKEAGDEEAKEIIKQLKEIVQLAYEMVQIYRTAKDEEEIRRAQEILELLLLFAEIVLIILKAILLALRLYKEAGDEEAKEIIKQLKEIVQLAYEMVQIYRTAKDEEEIRRAQEILELLLLFAEIVLIILKAILLALRLYKEAGDEEAKEIIKQLKEIVQLAYEMVQIYRTAKDEEEIRRAELILKELLIFAEYVLKHLKTLLEQ

SEQ ID NO: 352 - protein, 297 aa, synthetic construct
  REGION 1..297: note = Synthetic
DELEELLIRIIHVILEALSVAFRLYLEAGDEEAKEIIKQLKEIVQLAREMVQIYRTAKDEEEIRRAQEILELLLLFAEIVLIILKAILLALRLYKEAGDEEAKEIIKQLKEIVQLAYEMVQIYRTAKDEEEIRRAQEILELLLLFAEIVLIILKAILLALRLYKEAGDEEAKEIIKQLKEIVQLAYEMVQIYRTAKDEEEIRRAQEILELLLLFAEIVLIILKAILLALRLYKEAGDEEAKEIIKQLKEIVQLAYEMVQIYRTAKDEEEIRRAQEILELLLKFAEVVLQRLHANLQS

SEQ ID NO: 353 - protein, 283 aa, synthetic construct
  REGION 1..283: note = Synthetic
SDRELLELLSELTQIVAEALELVRRLYEETGDEKIRELEEQIRRLLEKAREMIRLVEQYGDEKAQEILELLIQIAKLILIVLKALKLVLRLYEETGDEKIRELYEQIQRLSEKAVEMIRLVEQYGDEKAQEILELLIQIAKLILIVLKALKLVLRLYEETGDEKIRELYEQIQRLSEKAVEMIRLVEQYGDEKAQEILELLIQIAKLILIVLKALKLVLRLYEETGDEKIRELYEQIQRLSEKAVEMIRLVEQYGDEKAQEILELLIRRAELILRQLEQIKLS

SEQ ID NO: 354 - protein, 219 aa, synthetic construct
  REGION 1..219: note = Synthetic
DIKIVEAYSLLIEVRLLAKLAGDPVLIEIAERLAKRLLEILQEGDMEQLERLIKIVQALVLLASVLLYARLAGDPVLIEIAERLAKRLLEILQEGDMEQLKRLIRIVQALLLLALVLLMAKAAGDPVLIEIAERLAKRLLEILQEGDEEQLERLIEIVRALLLLALVLLMAKAAGDPVLIEIAERLAKRLLEILQEGDREQLERLYLIVLKLLDLAERL

SEQ ID NO: 355 - protein, 246 aa, synthetic construct
  REGION 1..246: note = Synthetic
NEQEELITELLVLISRALALARSAGNPTLQEAAERLREELLELERLLQEGDERALEKLKQLILIVRLLVLIALAFLLALQAGNPTLQEAAERLMEELLELLRLLQEGDERALEKLKQLILIVRLLVLIAEAFLLAKQAGNPTLQEAAERLMEELLELLRLLQEGDERALEKLKQLIRIVLLLVLIAEAFLLAKQAGNPTLQEAAERLMEELLELLRLLQEGDERALHKLRELIEIVLRLVFRAKQS

SEQ ID NO: 356 - protein, 222 aa, synthetic construct
  REGION 1..222: note = Synthetic
DSIEELALEIRVIIERVVYYARKLGDPKMLELAQELLELVRQALELGDEEKASIILLAVQILYYIILVVKFARELGDPKMLELAQELLELVRQALELGDEEKASIILLAVQILYYIILVVKFARELGDPKMLELAQELLELVRQALELGDEEKASIILLAVQILYYIILVVKFARELGDPKMLELAQELLELVRQALELGDEKKAKRILLLVINLLNRIRYS

SEQ ID NO: 357 - protein, 207 aa, synthetic construct
  REGION 1..207: note = Synthetic
DELRIRVISLARQIQSLARLLGDPESLEQAQELLRRAENAKDEEELRHLLLVLQVMLLALEIILLARNLGDPESLEQAQELLRRASNAKDEEELRHLLLVLQVMLLALQIIKLAKELGDPESLEQAQELLRRASNAKDHRELYHLLLVLLVMLLALQIIKLAKELGDPESLEQAQELLRRASNAKDLHELLQLYVILLEMLFRLEQI

SEQ ID NO: 358 - protein, 222 aa, synthetic construct
  REGION 1..222: note = Synthetic
SELDELLTHALELIVRIETLARRMGDEKLLQSAREIEEEIRRVFEEGDKETLELLLLMLYAVWLIALILVLAKQMGDEKLLQSAREIFEEIRRVFEEGDKETLELLLLMLYAVWLIALILVLAKQMGDEKLLQSAREIFEEIRRVFEEGDKETLELLLLMLYAVWLIALILVLAKQMGDEKLLQSAREIFEEIRRVFEEGDKETLRKLLIELILIFTRAKLL

SEQ ID NO: 359 - protein, 257 aa, synthetic construct
  REGION 1..257: note = Synthetic
DQEVLEFVRRLLHEARRLDASSDEEEREKAERLLHTASLILQVLASVIEAELLARRILQQGDKEIAQLLREVVRFVIELVLEAARLAASSDEEEHEKAVELIQTALMIALVLISVARAWELAKKILQQGDKEIAQLLREVVRFVIELVLEAARLAASSDEEEHEKAVELIQTAFMIALVLISVARAWELAKKILQQGDKEIAQLLREVVRFVIELVLEAARLAASSDEEEHEKAKHLIEHAYLLALRLVFLAKEWES

SEQ ID NO: 360 - protein, 253 aa, synthetic construct
  REGION 1..253: note = Synthetic
DELERELLRIFHILLEVLKFARQAGDPELIELAKELLKEIRRLAKELREDPNAEEALEKVRQLYELAEILIMLVKVLQFARQAGDPELIELAKELLKEIIRLAKELQEDPNAEEALEKVRQLYELAEILIMLVKVLQFARQAGDPELIELAKELLKEIIRLAKELQEDPNAEEALEKVRQLYELAEILIMLVKVLQFARQAGDPELIELAKELLKEIIRLAKELQEDPNAEEALRLVRQLFIHAESLINEVRS

SEQ ID NO: 361 - protein, 261 aa, synthetic construct
  REGION 1..261: note = Synthetic
SEEYELLEIENLAREVLQNARYLGDPKLIEVAERLLEQVLELAKMVQNMSEEQIEEALRQLREIFFLLKILSQAAIVYILAQELGDPKLIEVAERLLEQVLELAKMVQNMSEEQIKRAQQELLLIFFLLRILSQAAIVYKLAQELGDPKLIEVAERLLEQVLELAKMVQNMSEEQQEEALRQLLFIYFLLVILSQAAIVYKLAQELGDPKLIEVAERLLEQVLELAKMVQNMSEEQRREALAQLIEIYIELLLLELRALRL

SEQ ID NO: 362 - protein, 218 aa, synthetic construct
  REGION 1..218: note = Synthetic
DEEYEILLLAYRLLFFALRLGDPKAIESAERIIEEIIRLSEEGDLEKMRKFYEILQILLLAVQLWLYAQELGDPKAIESAERIIEEIIRLSEEGDLEKMRKFYEILQILLLAVQLWLYAQQLGDPKAIESAERIIEEIIRLSEEGDLEKMRKFYRILEILLFAVQLWLYAQQLGDPKAIESAERIIEEIIRLSEEGDEEKMKHFLEILYRLLTRVRNS

SEQ ID NO: 363 - protein, 288 aa, synthetic construct
  REGION 1..288: note = Synthetic
DELLRILLTVLEALIIAEQLLRAGNEEAEEIIRTIQELMKRVIELIRIYETAKDEEELKRAKEKAQELLRQVHIILTVLEALHNAQKLLRAGNEEAEEIIRTIQELMKRVIELIRIYQTAKDEEELKRAKEKAEELYRQVYIILTVLQALITAQELLRAGNEEAEEIIRTIQELMKRVIELIRIYQTAKDEEELKRAKEKARELLEQVLIILYVLQALKTAQELLRAGNEEAEEIIRTIQELMKRVIELIRIYQTAKDEEELKRAKEKAEELLREVLLILIRLEERKS

SEQ ID NO: 364 - protein, 167 aa, synthetic construct
  REGION 1..167: note = Synthetic
SREELEVRLLIELLIHLARLTGDPLLRQLAQELLERMFKIVERNDFEKLEKLSEQAKVLILIARLIELARQTGDPLLRQLAQELLERMFKIVERNDFEKLEKLSLQALVLILIARLIELARQTGDPLLRQLAQELLERMFKIVERNDEEKLYELFKLANELVARALR

SEQ ID NO: 365 - protein, 198 aa, synthetic construct
  REGION 1..198: note = Synthetic
DELEERQTLIRFLVLQARRLLKRAKQKGLGVEIFLELLKIVLEVAKSFIFAKDEEEQERMLRLAKEAVQIARLILLALELLERAKQKGLGVEIFLELLKIVLEVAKSFIFAKDEEEQERMLRLAKEAVQIARLILLALELLERAKQKGLGVEIFLELLKIVLEVAKSFIFAKDEKLQRRALILATIAVLRAELILLEL

SEQ ID NO: 366 - protein, 198 aa, synthetic construct
  REGION 1..198: note = Synthetic
DELEYLHLVILVLEHRARKLLERAKQKGLGVEIFLELLKIVLEVAKSFIFAKDEEEQERMLRLAKEAVQIARLILLALELLERAKQKGLGVEIFLELLKIVLEVAKSFIFAKDEEEQERMLRLAKEAVQIARLILLALELLERAKQKGLGVEIFLELLKIVLEVAKSFIFAKDENEQKRALLLALEAVLEAEQILDRL

SEQ ID NO: 367 - protein, 226 aa, synthetic construct
  REGION 1..226: note = Synthetic
SQELFEQVLKREIEAKKEGDEEKLRLIEILRRVLKLAEEMQELSEEIQRYYEETGDPRAQELSELAKQVIEKALKAIQEGDEEKLRLIEILLRVLKLAWEMQELSEEIQRYYEETGDPRAQELSELAKQVIEKALKAIQEGDEEKLRLIEILLRVLKLAWEMQELSEEIQRYYEETGDPRAQELSELAKQVIELALKAIQEGDELKLRLILQRLNILIQEWRRQES

SEQ ID NO: 368 - protein, 222 aa, synthetic construct
  REGION 1..222: note = Synthetic
DEIEHIAIEIEAIIYLVELLARRLGDPKMLELAQELLELVRQALELGDEEKASIILLAVQILFYIILVVKFARELGDPKMLELAQELLELVRQALELGDEEKASIILLAVQILYYIILVVKFARELGDPKMLELAQELLELVRQALELGDEKKASIILLAVQILYYIILVVKFARELGDPKMLELAQELLELVRQALELGDDEKAFRILNLVRELLRRIENV

SEQ ID NO: 369 - protein, 273 aa, synthetic construct
  REGION 1..273: note = Synthetic
DQLEQLRETALQVETLAHRVKEAGNSRAEEILKMAQQLIESILRVLKRYEQTGDEEALKEARELVQLLQLVYTAALVIIIAFRVKRAGNSRAEEILKMAQQLIESILRVLKRYEQTGDEEALKEARELVQLLQLVYTAALVIIIAFRVKEAGNSRAEEILKMAQQLIESILRVLKRYEQTGDEEALKEARELLELLELVYLAALVIIIAFRVKEAGNSRAEEILKMAQQLIESILRVLKRYEQTGDEEALKEARELILLLSHVFDRAEQVIRS

SEQ ID NO: 370 - protein, 265 aa, synthetic construct
  REGION 1..265: note = Synthetic
YELELVLRIIALALYLAFLVVLKTGDRRILELVRRIVELAEEMLRLLNEYGDEEALKELRKLYELALVIIIIAQAILYAIRVVEKTGDWRILELVQRIVELALEMLRLFQQYGDEEALKELRKLYELALVIIIIAQAILYAIRVVEKTGDWRILELVQRIVELALEMLRLFQQYGDEEALKELRKLYELALVIIIIAQAILYAIRVVEKTGDWRILELVQRIVELALEMLRLFQQYGDEEALKELRKLYHLAVEIISSARALLES

SEQ ID NO: 371 - protein, 249 aa, synthetic construct
  REGION 1..249: note = Synthetic
DEEESLLLRVLVLAFLLRVYAHQAGDPEVIEAAQLLLEEIIRMIKLYLQYGDEEALEIAKELSQLLRVLILAVELLLFARKAGDPEVIEAAQLLLEEIIRMIKLYLQYGDEEALKIAELLSYLLRVLILAVELLLFARKAGDPEVIEAAQLLLEEIIRMIKLFLQYGDDEALVIALQLSQLLRVLILAVELLLFARKAGDPEVIEAAQLLLEEIIRMIKLYLQYGDEKALLIAVRLADELFRLILRVRS

SEQ ID NO: 372 - protein, 249 aa, synthetic construct
  REGION 1..249: note = Synthetic
SEEEEQLRRVLLLAYELRHFAELAGDPEVIEAAQLLLEEIIRMVKLYHQYGDEEALEIAKELSQLLRVLILAVELLLFARKAGDPEVIEAAQLLLEEIIRMIKLYLQYGDEEALEIAKELSQLLRVLILAVELLLFARKAGDPEVIEAAQLLLEEIIRMIKLYLQYGDEEALEIAKELSILLRVLILAVELLLFARKAGDPEVIEAAQLLLEEIIRMIKLYLQYGDEEALRIAQQLSIELFHLILQVRS

SEQ ID NO: 373 - protein, 219 aa, synthetic construct
  REGION 1..219: note = Synthetic
EEMVREIRHLVLLARLYLELGDEERAKRLLEKVLELLREISRLAKERNDDESMVLAIQVFVQAAELYLQLGDEEKAKRLLEKVLELLREISRLAKERNDDESMVLAIQVFVQAAELYLQLGDEEKAKRLLEKVLELLREISRLAKERNDDESMVLAIQVFVQAAELYLQLGDEEKAKRLLEKVLELLREISRLAKERNDRESEELAIEVKILAYRLEFS

SEQ ID NO: 374 - protein, 219 aa, synthetic construct
  REGION 1..219: note = Synthetic
DEEVIRIRALVYYARALLELGDEEKAKRILEKVLELLREISRLAKERNDDESMVLAIQVFVQAAELYLQLGDEEKAKRLLEKVLELLREISRLAKERNDDESMVLAIQVFVQAAELYLQLGDEEKAKRLLEKVLELLREISRLAKERNDDESMVLAIQVFVQAAELYLQLGDEEKAKRLLEKVLELLREISRLAKERNDKHSLELALEVESLARRLETL

SEQ ID NO: 375 - protein, 219 aa, synthetic construct
  REGION 1..219: note = Synthetic
DEEVYQIRILVELAELHLQKGDEERAKRLLEKVLELLREISRLAKERNDDESMVLAIQVFVQAAELYLQLGDEEKAKRLLEKVLELLREISRLAKERNDDESMVLAIQVFVQAAELYLQLGDEEKAKRLLEKVLELLREISRLAKERNDDESMVLAIQVFVQAAELYLQLGDEEKAKRLLEKVLELLREISRLARERNDDRSLELALQVEVLAHLLEFQ

SEQ ID NO: 376 - protein, 231 aa, synthetic construct
  REGION 1..231: note = Synthetic
DTEVLEVITEIFRYALELLRNGDYERARLLLRAAFIAILAVYFLLEAYLLMKKAGVKNAEQFQEVIETILEILLEALRLLKNGDYERARLLLEAALLAVQAVYFLASAYLLMKKAGVKNAEQFQEVIETILEILLEALRLLKNGDYERARLLLEAALLAVQAVYLLASAYLLMKKAGVKNAEQFQEVIETILEILLEALRLLKNGDYERARLLLERALDLVTRVYAEAKLS

SEQ ID NO: 377 - protein, 234 aa, synthetic construct
  REGION 1..234: note = Synthetic
SELERLAIKARTLVELARLSIEQAGVEDREEVEQVLRTIIQMLLEALRTGDEELFKLALLAALAVWLVAEAYLLIKEAGVEDREEVEQVLRTIIQMLLEALRTGDEELFKLALLAALAVWLVASAYLLIKEAGVEDREEVEQVLRTIIQMLLEALRTGDRRLFILALLAALAVWLVASAYLLIKEAGVEDREEVEQVLRTIIQMLLEALRTGDLHLFLRALSEAFYVFLYARIH

SEQ ID NO: 378 - protein, 234 aa, synthetic construct
  REGION 1..234: note = Synthetic
DELEELAIRARSLVFEAKLAIEHAGVEDREEVEQVLRTIIQMLLEALRTGDEELFKLALLAALAVYLVASAYLLIRQAGVEDREEVEQVLRTIIQMLLEALRTGDEELFKLALLAALAVWLVASAYLLIKEAGVEDREEVEQVLRTIIQMLLEALRTGDEELFRLALLAAEAVWLVASAYLLIKEAGVEDREEVEQVLRTIIQMLLEALRTGDKELFDKALVLAFEVFTRARSH

SEQ ID NO: 379 - protein, 222 aa, synthetic construct
  REGION 1..222: note = Synthetic
DELREILLQVEYLILLVEKLARELGDPELEEMARQLLESAERVLRNNDLEQAKIILILAQVLYYIAQVLKLAKELGDPELEEMARQLLESAERVLRNNDLEQAKIILILAQVLYYIAQVLKLAKELGDPELEEMARQLLESAERVLRNNDLEQAKIILILAQVLYYIAQVLKLAKELGDPELEEMARQLLESAERVLRNNDLEQAKHILLLAQRLYLEALLL

SEQ ID NO: 380 - protein, 234 aa, synthetic construct
  REGION 1..234: note = Synthetic
SELEYLAKEAKVLVDAAESLIRVAGVEDREEVEQVLRTIRQMLLEAERTGDEELFKLALLAALAVYLVAAAYLLILIAGVEDREEVEQVLRTIIQMLLEALRTGDEELFKLALLAALAVWLVASAYLLIKRAGVEDREEVEQVLRTIIQMLLEALRTGDEELFKLALLAALAVWLVASAYLLIKEAGVEDREEVEQVLRTIIQMLLEALRTGDEELFRKALHLAFQVYLKALSH

SEQ ID NO: 381 - protein, 168 aa, synthetic construct
  REGION 1..168: note = Synthetic
DTEFLQMHLLALQVLLVARDLGDEELSEFALRVLKELLELAKSGDLEEAQKNYEFLLMLLLALEVLRIAKQLGDEELSEFALRVLKELLELAKSGDLEEAQKNYFFLLMLLLALEVLRIAKQLGDEELSEFALRVLKELLELAKSGDREKALRNIEELLRILLQLQES

SEQ ID NO: 382 - protein, 233 aa, synthetic construct
  REGION 1..233: note = Synthetic
DKVKLLLHFILTILQFLQHATDEREQERAKELVELLFQIAQELFKKAKEAGDLELMVLALLALILLILISLQNATDEEEQRRLKEEVEELFQRAQELFKKAKEAGDLELMVLALLALILLILISLQNATDEEEQRRLKEEVEELFQRAQELFKKAKEAGDLELMVLALLALILLILISLQNATDEEEQRRLKEEVEELRQRAERLVELALRAGDLELLQLALNALRLLRLISL

SEQ ID NO: 383 - protein, 219 aa, synthetic construct
  REGION 1..219: note = Synthetic
VELERKLRELLLQIEHLAVRAGDEKIRELFEEAVRLLEEARQSGSLEDLKRVYLILQLISLLAQILLYWREAGDEKIRELFEEAVRLLEEARQSGSLEDLKRVYLILQLISLLAQILLYWREAGDEKIRELFEEAVRLLEEARQSGSLEDLKRVYLILQLISLLAQILLYWREAGDEKIRELFEEAVRLLEEARQSGSLEDLRHVFYHLRRISVFAQRL

SEQ ID NO: 384 - protein, 219 aa, synthetic construct
  REGION 1..219: note = Synthetic
DELIEQLEFLLDLIRLLWKHAGDEKIRELFEEAVRLLEEARQSGSERDLYRVYLILQLISLLALILFLWRLAGDEKIRELFEEAVRLLEEARQSGSLEDLYRVYLILQLISLLAQILLYWREAGDEKIRELFEEAVRLLEEARQSGSIEDLLRVYLILQLISLLAQILYTWRLAGDEKIRELFEEAVRLLEEARQSGSFEDLFRVYIFLLQILTFALRL

SEQ ID NO: 385 - protein, 219 aa, synthetic construct
  REGION 1..219: note = Synthetic
DELAIEAKIILLRAELYLLRGDEESVRELLQLVKRMAQTVFELAKRQGDPQALALAAELILLLAELFLKLGDEESVRELLQLVKRMAQTVFELAKRQGDPQALALAAELILLLAELFLKLGDEESVRELLQLVKRMAQTVFELAKRQGDPQALALAAELILLLAELFLKLGDEESVRELLQLVKRMAQTVFELAKRQGDPRALSLAYHLKHELTLLRQK

SEQ ID NO: 386 - protein, 219 aa, synthetic construct
  REGION 1..219: note = Synthetic
SELAYEAQEILLRARLHLERGDEESVRELLQLVKRMAQTVFELAKRQGDPHALALAAELILLLAELFLKLGDEESVRELLQLVKRMAQTVFELAKRQGDPQALALAAELILLLAELFLKLGDEESVRELLQLVKRMAQTVFELAKRQGDPQALALAAELILLLAELFLRLGDEESVRELLQLVKRMAQTVFELAKRQGDPQAEELALRLKHELLLLFEL

SEQ ID NO: 387 - protein, 207 aa, synthetic construct
  REGION 1..207: note = Synthetic
DELFKRAIELVSEAQLALTRYRLHGDEKYREIVEELIREAEELARKVSEAGNPEALWQAALVLVLIAQLALQSYKQTGDEKYREIVEELIREAEELARKVSEAGNPEALWQAALVLVNIAQLALQSYEQTGDEKYREIVEELIREAEELARKVSEAGNPEALRQAAEVLINIAYLALVSLLLTGDDKYHEIVKELLREATELVRLLS

SEQ ID NO: 388 - protein, 224 aa, synthetic construct
  REGION 1..224: note = Synthetic
DELLALAFHLYIKIRHLLRHGGSEEQIQELFEIALRVAKLMFEHVKRLGDLEKLILLAEAIFLLILVALRAGGSEEQIQELFEIALRVAKLMFEHVKRLGDLEQLILLAQAIFLLILVALRAGGSEEQIQELFEIALRVAKLMFEHVKRLGDLEQLILLAQAIFLLILVALRAGGSEEQIQELFEIALRVAKLMFEHVKRLGDEEQKVLLRYARNLLEYVARLA

SEQ ID NO: 389 - protein, 222 aa, synthetic construct
  REGION 1..222: note = Synthetic
EEEIEELLAQALALIFLVERLAKEAGDEESLEQVRRLYEQMRQYAKMGNLEEAEILFQLIQALLLILKVWKLAKEAGDEESLEQVRRLFEQMRQYAKMGNLEEAEILFQLIQALLLILKVWKLAKEAGDEESLEQVRRLFEQMRQYAKMGNLEEAEILFYLIQALLLILKVWKLAKENGDEESLEQVRRLFEQMRQYAKMGNLQEAKQLFLYIEHLLRRLEL

SEQ ID NO: 390 - protein, 222 aa, synthetic construct
  REGION 1..222: note = Synthetic
SEIERILIKVEALIRLVEILARELGDPELEEMARQLLESAERVLRNNDLEQAKIILILAQVLYYIAQVLKLAKELGDPELEEMARQLLESAERVLRNNDLEQAKIILILAQVLYYIAQVLKLAKELGDPELEEMARQLLESAERVLRNNDLEQAEIILILAQVLYYIAQVLKLAKELGDPELEEMARQLLESAERVLRNNDHEKAVKILLLAQELFTKARQL

SEQ ID NO: 391 - protein, 222 aa, synthetic construct
  REGION 1..222: note = Synthetic
DELELLFQRALQYALSIEELAKQTGDEEAVESAQEIREELRQVREQNDLEKLKLVLLFAQAIYYALLILLLAKRTGDEEAVESAQEIFEELRQVREQNDLEKLKLVLLFAQAIWYALLILRLAKRTGDEEAVESAQEIFEELRQVREQNDLEKLELVLTFAQAIWYALLILLLAKRTGDEEAVESAQEIFEELRQVREQNDREKLLHVLLKAIIILLRLRLS

SEQ ID NO: 392 - protein, 222 aa, synthetic construct
  REGION 1..222: note = Synthetic
DEHYELIVQAEALARLVEYYAEQAGDEELKELVRRILESLREALQRNDKELAKMVWLIASAVFYAALVLVIAQEAGDEELKELVRRILESLREALQRNDKELAKMVWLIASAVWYAALVLKIAQEAGDEELKELVRRILESLREALQRNDKKLAHMVWLIASAVWFAALVLKIAQEAGDEELKELVRRILESLREALQRNDIELAVRVYAIAFEVFFLAELS

SEQ ID NO: 393 - protein, 222 aa, synthetic construct
  REGION 1..222: note = Synthetic
DKMEKLIVEAEHFAQLVELIAERAGDEELKELVRRILESLREALQRNDKELAKMVWLIASAVHYAALVLEIAQEAGDEELKELVRRILESLREALQRNDKELAKMVWLIASAVWYAALVLKIAQEAGDEELKELVRRILESLREALQRNDKELAKMVWLIASAVWYAALVLKIAQEAGDEELKELVRRILESLREALQRNDKELAKQVYVFAIHVFFQAEVS

SEQ ID NO: 394 - protein, 248 aa, synthetic construct
  REGION 1..248: note = Synthetic
SEEIYHLLTLALKVFQLFFQGDYEEALQTLREVLELARQLIKEALREFKETGDPTALELAILALLIVAQLVQLLMKAGDYEEALQTLREVLELARQLIKEALREFKETGDPTALELAILALLIVAQLVQLLMKAGDYEEALQTLREVLELARQLIKEALREFKETGDPTALELAILALLIVAQLVQLLMKAGDYEEALQTLREVLELARQLIKEALREFKETGDPRALQLAHLARLIVIDLERLELEA

SEQ ID NO: 395 - protein, 245 aa, synthetic construct
  REGION 1..245: note = Synthetic
YEEAQRAAFHFYEQWRRESEELRKRGDKEKIRELLLKLLQELIELARKAGISEEMVIYVAAWLAARAFFRQWVQESEELRKRGDKEKIRELLLKLLQELIELARKAGISEEMVIHVAAWLAALAFFRQWVQESEELRKRGDKEKIRELLLKLLQELIELARKAGISEKDVKFVAAFLAALAFFRQWVQESEELRKRGDKEKIRELLLKLFQELIELARKAGISEQLVRIVASRLYVLAQELLFRQ

SEQ ID NO: 396 - protein, 232 aa, synthetic construct
  REGION 1..232: note = Synthetic
KEQAHLAVLQFYVEFIRRARKATSPEEILQLLTELLQKFSEIMKKLGVSEEILLKAVAELAVRLFYFLFIVRARKATSPEEILQLLTELLQKFSEIMKKLGVSEEILLKAVAELAVRLFYWLFIQRARKATSPEEILQLLTELLQKFSEIMKKLGVSEEILLKAVAELAVRLFYWLFIQRARKATSPEEILQLLTELLQKFSEIMKKLGVSEEILERALLLLEHLLREFLHL

SEQ ID NO: 397 - protein, 256 aa, synthetic construct
  REGION 1..256: note = Synthetic
DELEIIFARILEIALRARSIARKLLQKYGDPSAQEIREIALEIIQRAKEALLMGDEEKLRLLLILIEILLLAALAMLIAVKLLQKYGDPSAQEILEIALEIVQRAKEALLMGDEEKLRLLLILIEILLLAALAMLIAVKLLQKYGDPSAQEILEIALEIVQRAKEALLMGDEEKLRLLLILIEILLLAALAMLIAVKLLQKYGDPSAQEILEIALEIVQRAKEALLMGDERKLLHLLTEIIHLLLKAETLLYEVKS

SEQ ID NO: 398 - protein, 256 aa, synthetic construct
  REGION 1..256: note = Synthetic
SELEEILNRISLIAHEARLIAELLLREYGDPSAQEILEIALEIVQRAKEALLMGDEEKLRLLLILIEILLLAALAMLIAVKLLKKYGDPSAQEILEIALEIVQRAKEALLMGDEEKLRLLLILIEILLLAALAMLIAVKLLQKYGDPSAQEILEIALEIVQRAKEALLMGDEEKLRLLLILIEILLLAALAMLIAVKLLQKYGDPSAQEILEIALEIVQRAKEALLMGDRRKLEHLLHLILELLLEAETLLRRVES

SEQ ID NO: 399 - protein, 256 aa, synthetic construct
  REGION 1..256: note = Synthetic
SRLERILHRIIEIALRAQVIALLLKELYGDPSAQEILEIALEIVQRAREALLMGDEEKLRLLLILIEILLLAALAMLIAVRLLLEYGDPSAQEILEIALEIVQRAKEALLMGDEEKLRLLLILIEILLLAALAMLIAVKLLQKYGDPSAQEILEIALEIVQRAKEALLMGDEEKLRLLLILIEILLLAALAMLIAVKLLQKYGDPSAQEILEIALEIVQRAKEALLMGDERKLRELRLLIYRLLLEARTMLNEVET

SEQ ID NO: 400 - protein, 256 aa, synthetic construct
  REGION 1..256: note = Synthetic
DELELILHRIRIIAFSARTLAEFLLEHYGDPSAQEILEIALEIVQRAKEALLMGDEEKLRLLLILIEILLLAALAMLIAVLLLLRYGDPSAQEILEIALEIVQRAKEALLMGDEHKLRLLLILIEILLLAALAMLIAVKLLQKYGDPSAQEILEIALEIVQRAKEALLMGDKHKLYLLLILIRILLLAALAMLIAVKLLQKYGDPSAQEILEIALEIVQRAKEALLMGDLEKLLELYLLILRLLLQARYMLEEVKH

SEQ ID NO: 401 - protein, 222 aa, synthetic construct
  REGION 1..222: note = Synthetic
DEIELILILVEIHILFVLILAKRLGDPELEEMARQLLESAERVLRNNDLEQAKIILILAQVLFYIAIVLLIAQNLGDPELEEMARQLLESAERVLRNNDLHQAEIILILAQVLYYIAQVLKLAKELGDPELEEMARQLLESAERVLRNNDHRQAYIILILAQVLYYIAQVLKLAKELGDPELEEMARQLLESAERVLRNNDLEQALQILIDAFRLYLIAREL

SEQ ID NO: 402 - protein, 253 aa, synthetic construct
  REGION 1..253: note = Synthetic
DELEKLYVHILYLVLQALEIAKKLLREAGDPAAKELSQLALEILQRAKEMLELGDYEQLELLSLLVKILWFVALAVLIAIKLLREAGDPAAKELSQLALEIVQRAKEMLELGDYEQLELLSLLVKILWFVALAVLIAIKLLREAGDPAAKELSQLALEIVQRAKEMLELGDYEQLELLSLLVKILWFVALAVLIAIKLLREAGDPAAKELSQLALEIVQRAKEMLELGDYRALERLSHEVLLLFIRARLFELN

SEQ ID NO: 403 - protein, 253 aa, synthetic construct
  REGION 1..253: note = Synthetic
SELEELFDEILRLVRNAEVIAHHLLRRAGDPAAKELSQLALEIEQRAKEMLELGDYEQLELLSLLVKILWFVALAVEIAIKLLEEAGDPAAKELSQLALEIVQRAKEMLELGDYEQLELLSLLVKILWFVALAVLIAIKLLREAGDPAAKELSQLALEIVQRAKEMLELGDYEQLELLSLLVKILWFVALAVLIAIKLLREAGDPAAKELSQLALEIVQRAKEMLELGDKRQLRELLHIVLELVLRAEFKLDS

SEQ ID NO: 404 - protein, 258 aa, synthetic construct
  REGION 1..258: note = Synthetic
SELEEALQRALQLLVQIELLAEESLRRDPNAAEFREVWRDAKEMYRLVRELSRRGDEEKLQILLALLQALLLVLQISKLAQESLERDPNAAEFREVWRDAKEMLRLVKELSERGDLEKLQILLALLQALLLVLQISKLAQESLERDPNAAEFREVWRDAKEMLRLVKELSERGDLEKLQILLALLQALLLVLQISKLAQESLERDPNAAEFREVWRRAKEMLRLVKELSERGDREKLLELLSLLFLLLRLLRESKRAQ

SEQ ID NO: 405 - protein, 249 aa, synthetic construct
  REGION 1..249: note = Synthetic
DRRLELLERAQKLLNRVRRLASEIKQQGDPLFEEAEELAQQAEELVERAYHSTDEEELRMLILILQALLLVIQVLKLAEEIKKQGDPLFEEAEELAQQARELVERARKSTDEEELRMLILILQALLLVIQVLKLAEEIKKQGDPLFEEAEELAQQARELVERARKSTDEEELRMLILILQALLLVIQVLKLAEEIKKQGDPLFRFAEELAQLARELVERARKSTDEEELRKLIEQLKDLLRIIEHLYRL

SEQ ID NO: 406 - protein, 249 aa, synthetic construct
  REGION 1..249: note = Synthetic
DRLLELIERALELVYLVQKIALRIRYEGDPLFEEAEELAQQAHELVERALKSTDEEELRMLILILQALLLVIQVLKLAEEIKKQGDPLFEEAEELAQQARELVERARKSTDEEELRMLILILQALLLVIQVLKLAEEIKKQGDPLFEEAEELAQQARELVERARKSTDEEELRMLILILQALLLVIQVLKLAEEIKKQGDPLFELAEELAQRARELVERARKSTDEEELRMLIHQLKLLLHVIEYLYEL

SEQ ID NO: 407 - protein, 249 aa, synthetic construct
  REGION 1..249: note = Synthetic
DRREELIIRAYRLVFKVTTIARKIKKQGDPLFEEAEELAQQARELVERAQKSTDEEELRMLILILQALLLVIQVLKLAEEIKKQGDPLFEEAEELAQQARELVERARKSTDEEELRMLILILQALLLVIQVLKLAEEIKKQGDPLFEEAEELAQQARELVERARKSTDEEELRMLILILQALLLVIQVLKLAEEIKKQGDPRFRLAERLAQIARELVERARKSTDETELYFLIELLKLLLRVIQLDYLS

SEQ ID NO: 408 - protein, 249 aa, synthetic construct
  REGION 1..249: note = Synthetic
LRMLILREQAHRLALLVISIAIRIKVKGDPLFEEAEELAQQAEELLQRAQKSTDEEELRMLILILQALLLVIQVLKLAEEIKKQGDPLFEEAEELAQQARELVERARKSTDEEELRMLILILQALLLVIQVLKLAEEIKKQGDPLFEEAEELAQQARELVERARKSTDEEELRMLILILQALLLVIQVLKLAEEIKKQGDPLFEEAEELAQQARELVERARKSTDEEELRKLIRLLKTLLELIETLYRS

SEQ ID NO: 409 - protein, 258 aa, synthetic construct
  REGION 1..258: note = Synthetic
DDLLHEILRLALIVHTIARKAERAGMPEEIIKTLRELAENVYEAAQRLKESGDEEEARFLLLLAQILLLAVQVFYLMSQAKEAGMPEEIIKTLRELAENVYEAAQRLKESGDEEEARFLLLLAQILLLAVQVFYLMSQAKEAGMPEEIIKTLRELAENVYEAAQRLKESGDEEEARFLLLLAQILLLAVQVFYLMSQAKEAGMPEEIIKTLRELAENVYEAAQRLKESGDEEEARRLLRIARLLLTEVELEYEYSQRS

SEQ ID NO: 410 - protein, 258 aa, synthetic construct
  REGION 1..258: note = Synthetic
LLLERQILELAVIVLSIALRAELAGMPEEIIKTLRELAENVEEAARRLQESGDEEEARFLLLLAQILLLAVQVFYLMSQAKEAGMPEEIIKTLRELAENVYEAAQRLKESGDEEEARFLLLLAQILLLAVQVFYLMSQAKEAGMPEEIIKTLRELAENVYEAAQRLKESGDEEEARFLLLLAQILLLAVQVFYLMSQAKEAGMPEEIIKTLRELAENVYEAAQRLKESGDEEEARFLLKRAEHLLERVETLFRRSQIH

SEQ ID NO: 411 - protein, 258 aa, synthetic construct
  REGION 1..258: note = Synthetic
DELLSRILQIAVLVLEIVIKAKHAGMPEEIIKTLEELARNVLEAAVRLHKSGDEEEARFLLLLAQILLLAVQVFYLMSQAKEAGMPEEIIKTLRELAENVYEAAQRLKESGDEEEARFLLLLAQILLLAVQVFYLMSQAKEAGMPEEIIKTLRELAENVYEAAQRLKESGDEEEARFLLLLAQILLLAVQVFYLMSQAKEAGMPEEIIKKLRELAENVYEAAQRLKESGDEEEARFLLLLAQILLERVERLFESSKTN

SEQ ID NO: 412 - protein, 222 aa, synthetic construct
  REGION 1..222: note = Synthetic
SEIELILIEVELLIHRVREIAKELGDPELEEMARQLLESAERVLRNNDLEQAKIILILAQVLYYIAQVLKLAKELGDPELEEMARQLLESAERVLRNNDLEQAKIILILAQVLYYIAQVLKLAKELGDPELEEMARQLLESAERVLRNNDLEQAEIILILAQVLYFIAQVLKLAKELGDPELEEMARQLLESAERVLRNNDHEKAYRILAEAQVLFVNARKL

SEQ ID NO: 413 - protein, 258 aa, synthetic construct
  REGION 1..258: note = Synthetic
DDLEELIELIARLVFIIMSKAKEAGMPEEIIKTLRELAENVYEAAQRLKESGDRLEAYFLLLLAQILLLAVRVFYLMSQAKEAGMPEEIIKTLRELAENVYEAAQRLKESGDREEARFLLLLAQILLLAVQVFYLMSQAKEAGMPEEIIKTLRELAENVYEAAQRLKESGDEREARFLLLLAQILLLAVQVFYLMSQAKEAGMPEEIIKTLRELAENVYEAAQRLKESGDEREAHHLLTLAQELLELVEEFFDESERK

SEQ ID NO: 414 - protein, 258 aa, synthetic construct
  REGION 1..258: note = Synthetic
DELLEEILKIAFEVRVLMYIAKVAGMPEEIIKTLRELAENVYEAAQRLRKSGDEEEARFLLLLAQILLLAVQVFFLMSRAKRAGMPEEIIKTLRELAENVYEAAQRLKESGDEEEARFLLLLAQILLLAVQVFYLMSQAKEAGMPEEIIKTLRELAENVYEAAQRLKESGDEEEAKFLLLLAQILLLAVQVFYLMSQAKEAGMPEEIIKTLRELAENVYEAAQRLKESGDTREAIRLLNEAYELLTAVEVHYRESQLE

SEQ ID NO: 415 - protein, 258 aa, synthetic construct
  REGION 1..258: note = Synthetic
DELLEKILRLANEVHLIMRLAKRAGMPEEIIKTLRELAENVYEAAQRLEESGDEEEARFLLLLAQILLLAVQVFYLMSRAKEAGMPEEIIKTLRELAENVYEAAQRLKESGDEEEARFLLLLAQILLLAVQVFYLMSQAKEAGMPEEIIKTLRELAENVYEAAQRLKESGDEEEAKFLLLLAQILLLAVQVFYLMSQAKEAGMPEEIIKILREIAENVYEAAQRLKESGDEKEAIRLLLEAIYLLYEVEIYYLESQRK

SEQ ID NO: 416 - protein, 258 aa, synthetic construct
  REGION 1..258: note = Synthetic
SLLEEQILHLAQLVFSIVYFAELAGMPEEIIKTLRELAENVEEAARRLQESGDEEEARFLLLLAQILLLAVQVFYLMSRAKRAGMPEEIIKTLRELAENVYEAAQRLKESGDEEEARFLLLLAQILLLAVQVFYLMSQAKEAGMPEEIIKTLRELAENVYEAAQRLKESGDEEEARFLLLLAQILLLAVQVFYLMSQAKEAGMPEEIIKTLRELAENVYEAAQRLKESGDEREALELLVLAQELLSLVEILYRFSQNS

SEQ ID NO: 417 - protein, 251 aa, synthetic construct
  REGION 1..251: note = Synthetic
ELVLLEIEILLKNATRNFQINRRHGDLEHLKEMFERIKQLFEEVQRLLEEAKRLGDPELVLLAIEILLQAATSLFQNLRQQGDLEKLKEMFERIKQLFEEVQRLLEEAKRLGDPELVLLAIEILLQAATSLFQNLRQQGDLEKLKEMFERIKQLFEEVQRLLEEAKRLGDPELVLLAIEILLQAATSLFQNLRQQGDLEKLKEMFERIRQLYEEVKRLLEEAERLGDPRLVHLALEILLFAIRSLLENERQ

SEQ ID NO: 418 - protein, 251 aa, synthetic construct
  REGION 1..251: note = Synthetic
EEELHTIENLLKSAEQLFQTLRKRGDLEKLKEVFERIKQLFEEVQRLLEEAKRLGDPELVLLAIEILLQAATSLFQNLRQQGDLEKLKEMFERIKQLFEEVQRLLEEAKRLGDPELVLLAIEILLQAATSLFQNLRQQGDLEKLKEMFERIKQLFEEVQRLLEEAKRLGDPELVLLAIEILLQAATSLFQNLRQQGDLEKLKEMFERIKQLYEEVKRLFEEAERLGDPRLLRLALRILEFALEVLLKNEEQ

SEQ ID NO: 419 - protein, 251 aa, synthetic construct
  REGION 1..251: note = Synthetic
DSELYKIERLLQIATEEFQRLRQQGDLERLKEVFEEIKQLFEEVQRLLEEAKRLGDPELVLLAIEILLQAATSLFQNLRQQGDLEKLKEMFERIKQLFEEVQRLLEEAKRLGDPELVLLAIEILLQAATSLFQNLRQQGDLEKLKEMFERIKQLFEEVQRLLEEAKRLGDPELVLLAIEILLQAATSLFQNLRQQGDLEKLKEMFERIKQLYEEVRRLLEEARRLGDPELVKLAAHILAFANQVLNENEVL

SEQ ID NO: 420 - protein, 251 aa, synthetic construct
  REGION 1..251: note = Synthetic
EEELKRIEQRLKIATLLFQILLRNGDLEQLKEVFERIKQLFEEVQRLLEEAKRLGDPELVLLAIEILLQAATSLFQNLRQQGDLEKLKEMFERIKQLFEEVQRLLEEAKRLGDPELVLLAIEILLQAATSLFQNLRQQGDLEKLKEMFERIKQLFEEVQRLLEEAKRLGDPELVLLAIEILLQAATSLFQNLRQQGDLEKLKEMFERIKQLYEEVERLLEEAKRLGDPELVELAKRILEFALLSLTKNEVQ

SEQ ID NO: 421 - protein, 178 aa, synthetic construct
  REGION 1..178: note = Synthetic
LVREAYYLAQILLFRFQLEGDERLLEKVEEILKILIELLRKSTDPEILVQIASSIAQLLLQMYRETGDERLLEKVEEILKILIELLRKSTDPEILVQIASSIAQLLLQMYRETGDERLLEKVEEILKILIELLRKSTDPEILRQIARNIALLLIQMILVVGDKRLLEKIKEILEIYIH

SEQ ID NO: 422 - protein, 233 aa, synthetic construct
  REGION 1..233: note = Synthetic
SVRELAELLAHEIFFHILVLILQATDEEEIKELLRKLLETIKQLAKMAGVPEEEIVRLMAQLAAQVIFFFILELIKQATDEEEIKELLRKLLETIKQLAKMAGVPEEEIVRLMAQLAAQVIFEFILELIKQATDEEEIKELLRKLLETIKQLAKMAGVPEEEIVKLMAELAAQVIFEFILELIKQATDEEEIKELLRKLLETIKQLAKMAGVPEDQIETLARLLAHRVRHHYS

SEQ ID NO: 423 - protein, 220 aa, synthetic construct
  REGION 1..220: note = Synthetic
DLEFALRIEFFIRLLEHLARELGDPELYKTAQRLLEKLQEVTEMGDLEKIVLILFAVQIAYYIALLLKLARELGDPELYKTAQRLLEKLQEVTEMGDLEKIVLILFAVQIAYYIALLLKLARELGDPELYKTAQRLLEKLQEVTEMGDEEKIRLILIAVQIAYYIALLLKLARELGDPELYKTAQRLLEKLQEVTEMGDEEKIFRILAQVQYAYEKALRL

SEQ ID NO: 424 - protein, 233 aa, synthetic construct
  REGION 1..233: note = Synthetic
DVQLRARILALQIYLHILELILQATDEEEIKELLRKLLETIKQLAKMAGVPEEEIVRLMAQLAAQVIFLFILQLIEQATDEEEIKELLRKLLETIKQLAKMAGVPEQEIVRLMAQLAAQVIFLFILELIKQATDEEEIKELLRKLLETIKQLAKMAGVPESEIVRLMAQLAAQVIFEFILELIKQATDEEEIKELLRKLLETIKQLAKMAGVPEELIRVLILELAHQVILEFS

SEQ ID NO: 425 - protein, 233 aa, synthetic construct
  REGION 1..233: note = Synthetic
DVREEAELLAQRIFLHILRLIKQATDEEEIKELLRKLLETIKQLAKMAGVPEEEIVRLMAQLAAQVIFEFILELIKQATDEEEIKELLRKLLETIKQLAKMAGVPEREIVRLMAQLAAQVIFEFILELIKQATDEEEIKELLRKLLETIKQLAKMAGVPEEEIVRLMAQLAAQVIFEFILELIKQATDEEEIKELLRKLLETIKQLAKMAGVPEYNILYLAFELAREVIKQFI

SEQ ID NO: 426 - protein, 237 aa, synthetic construct
  REGION 1..237: note = Synthetic
DRLEHLLQELFRIAADLEKFTLKYGDPRLRELMQQVQELLRKATEAYKLGDKETLELILLLAQLVLIAAFLIEFTKKYGDPRLRELMQQVLELLRKAQEATELGDKETLELILLLAQLVLIAAFLIEFTKKYGDPRLRELMQQVLELLRKAQEATELGDKETLELILLLAQLVLIAAFLIEFTKKYGDPELRELMQQVLELLRKAQEATELGDKETLRRILHEALQVLNQAFVIERS

SEQ ID NO: 427 - protein, 277 aa, synthetic construct
  REGION 1..277: note = Synthetic
DERRELIRIATLVQEILAEVEYLAKELLKYGDKEAKEIMELIYELVQKAKEAVQTLEETGDPRALEIAQLILIAVQVLLILLLVIKLARELLKYGDKEAKEIMELIYELVQKAIEAVQTLEETGDPRALEIAQLILIAVQVLLILLLVIKLARELLKYGDKEAKEIMELIYELVQKAIEAVQTLEETGDPRALEIAQLILIAVQVLLILLLVIKLARELLKYGDKEAKEIMELIYELVQKAIEAVQTLEETGDPRARKLAKFILLQVRVLLTLLEVL

SEQ ID NO: 428 - protein, 277 aa, synthetic construct
  REGION 1..277: note = Synthetic
LEREQLIEIAATVLRILFLVRFHARYLLKYGDKEAKEIMELIYELVQKAEEAIRTLEETGDPRALEIAQLILIAVQVLLILLLVIRLARELLKYGDKEAKEIMELIYELVQKAIEAVQTLEETGDPRALEIAQLILIAVQVLLILLLVIKLARELLKYGDKEAKEIMELIYELVQKAIEAVQTLEETGDPRALEIAQLILIAVQVLLILLLVIKLARELLKYGDKEAKEIMELIYELVQKAIEAVQTLEETGDPRAREIAERILYEVRLLLRRLLEI

SEQ ID NO: 429 - protein, 253 aa, synthetic construct
  REGION 1..253: note = Synthetic
DEKELRFQQLVVEIQLLAIQLKRQLGDESAKELSREVLELLRKFVEMLRLGDEEKAQQILEILEFIYLVLLIILLALRLIKQLGDESAKELAREVLELLRKFVEMLRLGDEEKAQQILEILEFIYLVLLIILLALRLIKQLGDESAKELAREVLELLRKFVEMLRLGDEEKAQQILEILEFIYLVLLIILLALRLIKQLGDESAKELAREVLELLRKFVEMLRLGDEEKAQQILEILRHIEVELRILLLEFER

SEQ ID NO: 430 - protein, 253 aa, synthetic construct
  REGION 1..253: note = Synthetic
DREEAQFRSLVHQIISLAIELQERLGDESAKELAREVEELLRKFVEMLRLGDEEKAQQILEILEFIYLVLLIILLALRLIKQLGDESAKELAREVLELLRKFVEMLRLGDEEKAQQILEILEFIYLVLLIILLALRLIKQLGDESAKELAREVLELLRKFVEMLRLGDEEKAQQILEILEFIYLVLLIILLALRLIKQLGDESAKELAREVLELLRKFVEMLRLGDEEKAREILIRLEEIFLRLQELLVRLKS

SEQ ID NO: 431 - protein, 253 aa, synthetic construct
  REGION 1..253: note = Synthetic
SEEEIRFRILVLEIRLLAEYLEQILGDESAKELAREVLELLRKFVEMLRLGDEEKAQQILEILEFIYLVLLIIILALELILLLGDESAKELAREVLELLRKFVEMLRLGDEEKAEQILEILEFIYLVLLIILLALRLIKQLGDESAKELAREVLELLRKFVEMLRLGDEEKANNILLILEFIYLVLLIILLALRLIKQLGDESAKELAREVLELLRKFVEMLRLGDQEKAQEIFRRLSEIYFHLLLLLLRLRS

SEQ ID NO: 432 - protein, 253 aa, synthetic construct
  REGION 1..253: note = Synthetic
SEEEIHFEFLVLEIRLLAYYLEVILGDESAKELAREVLELLRKFVEMLRLGDEEKAQQILEILEFIYLVLLIILLALRLIRQLGDESAKELAREVLELLRKFVEMLRLGDEEKAQQILEILEFIYLVLLIILLALRLIKQLGDESAKELAREVLELLRKFVEMLRLGDEEKAQQILEILEFIYLVLLIILLALRLIKQLGDESAKELAREVLELLRKFVEMLRLGDEEKAEEIYEILLRIRQELEEILLRLES

SEQ ID NO: 433 - protein, 253 aa, synthetic construct
  REGION 1..253: note = Synthetic
SEEEIEFKLLVLEIRLLAEKLIRQLGDESAKELAREVLELLRKFVEMLRLGDEEKAQQILEILEFIYLVLLIILLALRLIKQLGDESAKELAREVLELLRKFVEMLRLGDEEKAQQILEILEFIYLVLLIILLALRLIKQLGDESAKELAREVLELLRKFVEMLRLGDEEKALEILLILEFIYLVLLIILLALRLIKQLGDESAKELAREVLELLRKFVEMLRLGDQRKAAEILSELYRIYVQLRFLLFELEQ

SEQ ID NO: 434 - protein, 220 aa, synthetic construct
  REGION 1..220: note = Synthetic
LEEFATRIEIIILALEILARQLGDPELYKTAQRLLEKLQEVTEMGDLEKIVLILFAVQIAYYIALLLRLARELGDPELYKTAQRLLEKLQEVTEMGDLEKIVLILFAVQIAYYIALLLKLARELGDPELYKTAQRLLEKLQEVTEMGDLRKIQLILFAVQIAYYIALLLKLARELGDPELYKTAQRLLEKLQEVTEMGDLRKILRILAEVIYAFLYAQLL

SEQ ID NO: 435 - protein, 236 aa, synthetic construct
  REGION 1..236: note = Synthetic
DEKEEQRQRALELLFRAEILVELAGSPEAREILQKLREMLEELLEAIRNGDEEKVKKAEQSLRALYLLLEALLLVKKAGSPEAREILQKLREMLEELLEAIRNGDEEKVKKAEQSLRALYLLLEALLLVKQAGSPEAREILQKLREMLEELLEAIRNGDEEKVKKAEQSLKALYLLLEALLLVKRAGSPEAREILQKLREMLEELLEAIRNGDEEKVREALKNLFFLFYELEALLL

SEQ ID NO: 436 - protein, 253 aa, synthetic construct
  REGION 1..253: note = Synthetic
DKIEELLREAYHLVLEAHFLAERLQRKTGDPKAREIAERIFEILERMIRASQEGDKEKVKILLLLAQAILLVALALLLADELQEKTGDPKAREIAERIFEILERMIRASQEGDKEKVKILLLLAQAILLVALALLLADELQEKTGDPKAREIAERIFEILERMIRASQEGDKEKVKILLLLAQAILLVALALLLADELQEKTGDPKAREIAERIFEILERMIRASQEGDKEKVHHLLQEAELILLLAEYLLRS

SEQ ID NO: 437 - protein, 253 aa, synthetic construct
  REGION 1..253: note = Synthetic
DKIEQLLLRAYELVFEAHRLARELQEKTGDPKAREIAERIFEILERMIRASQEGDKEKVKILLLLAQAILLVALALLLADELQEKTGDPKAREIAERIFEILERMIRASQEGDKEKVKILLLLAQAILLVALALLLADELQEKTGDPKAREIAERIFEILERMIRASQEGDKEKVKILLLLAQAILLVALALLLADELQEKTGDPQAREIAERIFEILERMIRASQEGDEEKVRQLLLYAQLILRLAELLLRS

SEQ ID NO: 438 - protein, 253 aa, synthetic construct
  REGION 1..253: note = Synthetic
DKLDELLIRASHLVTRAHFLAKQLQEKTGDPKAREIAERIFEILERMIRASQEGDKEKVKILLLLAQAILLVALALLLADELQEKTGDPKAREIAERIFEILERMIRASQEGDKEKVKILLLLAQAILLVALALLLADELQEKTGDPKAREIAERIFEILERMIRASQEGDKEKVKILLLLAQAILLVALALLLADELQEKTGDPEAREIAERIFEILERMIRASQEGDREKVFRLLILAEFILQLAELLLKL

SEQ ID NO: 439 - protein, 253 aa, synthetic construct
  REGION 1..253: note = Synthetic
DKIEHLLHEAIILVAHAELLAHRLQKKTGDPKAREIAERIREILERMRRASQEGDKEKVKILLLLAQAILLVALALLLADELQEKTGDPKAREIAERIFEILERMIRASQEGDKEKVKILLLLAQAILLVALALLLADELQEKTGDPKAREIAERIFEILERMIRASQEGDKEKVKILLLLAQAILLVALALLLADELQEKTGDPKAREIAERIFEILERMIRASQEGDKEKVKILLHQARVILQYAELLLRS

SEQ ID NO: 440 - protein, 256 aa, synthetic construct
  REGION 1..256: note = Synthetic
LRLLLLLREAIRLAIEVEFLAQHLRTLTGDPRAKQLAEKVFESLEEAEQALREGDEEKLRLLLLLLKAVLLALLVLLLALELLQRTGDPRAKQLAEKVFESLEEAEQALREGDEEKLRLLLLLLKAVLLALLVLLLALELLQRTGDPRAKQLAEKVFESLEEAEQALREGDEEKLRLLLLLLKAVLLALLVLLLALELLQRTGDPRAKQLAEKVFESLEEAEQALREGDEEKLRRLLKYLEHIFLLLLLLLIELEL

SEQ ID NO: 441 - protein, 221 aa, synthetic construct
  REGION 1..221: note = Synthetic
DELEIEAFVLAYTVEVIAKKTGDMELWRKAKELLRLVEEMSRMGDEREVHYLYLLLQAIVLALRVSFLAKLTGDMELWRKAKELLRLVEEMSRMGDRESVHRLFRLLQAILLALLVSFLAKQTGDMELWRKAKELLRLVEEMSRMGDEESVERLFLLLQAILLALQVSYLAKRTGDMELWRKAKELLRLVEEMSRMGDEERVLRLLYLLEQILERLRRSFL

SEQ ID NO: 442 - protein, 221 aa, synthetic construct
  REGION 1..221: note = Synthetic
DELEAEAYRIAVEVKKLAEQTGDMELWRKAKELLRLVEEMSRMGDEESVERLFLLLQAILLALQVSYLAKQTGDMELWRKAKELLRLVEEMSRMGDEESVERLFLLLQAILLALQVSYLAKQTGDMELWRKAKELLRLVEEMSRMGDEESVERLFLLLQAILLALQVSYLAKQTGDMELWRKAKELLRLVEEMSRMGDEEQVYRLFLLLKFILELLEYLYL

SEQ ID NO: 443 - protein, 254 aa, synthetic construct
  REGION 1..254: note = Synthetic
DELAQKVRHLAFEIRALLEELKLLGMSEEQLERLKQQIEEVIESALEALRRGDETLAKLALLAMKVLFLSVQILKLLLELKRAGMSEEQLERLKQQIEEVIESALEALRRGDETLAKLALLAMKVLFLSVQILKLLLELKRAGMSEEQLERLKQQIEEVIESALEALRRGDETLAKLALLAMKVLFLSVQILKLLLELKRAGMSEEQLERLKQQIEEVIESALEALRRGDETLAKLALRLMKRLYYEVRYLRLS

SEQ ID NO: 444 - protein, 254 aa, synthetic construct
  REGION 1..254: note = Synthetic
DEIAIQVRLLSLHIKQLLQQLKEAGMSEEQLERLKQQIEEVIESALEALRRGDETLAKLALLAMKVLFLSVQILKLLLELKRAGMSEEQLERLKQQIEEVIESALEALRRGDETLAKLALLAMKVLFLSVQILKLLLELKRAGMSEEQLERLKQQIEEVIESALEALRRGDETLAKLALLAMKVLFLSVQILKLLLELKRAGMSEEQLERLKQQIEEVIESALEALRRGDEELAKRAHYQMLVLFALVLLLKIS

SEQ ID NO: 445 - protein, 222 aa, synthetic construct
  REGION 1..222: note = Synthetic
NRLEELLLRIEVLIRLVLHLARQLGDPEVYEAAKQLLESAQEALQRGDFEKVRLITLLAQILLLILLVLKLARELGDPEVYEAAKQLLESAQEALQRGDFEKVRLITLLAQILLLILLVLKLARELGDPEVYEAAKQLLESAQEALQRGDFHKVRLITLLAQILLLILLVLKLARELGDPEVYEAAKQLLESAQEALQRGDYRLVLEIYFLALLLLELLRYS

SEQ ID NO: 446 - protein, 254 aa, synthetic construct
  REGION 1..254: note = Synthetic
DELAEEVRELSEQIKANLRLLKELGMSEEQLERLKQQIEEVIESALEALRRGDETLAKLALLAMKVLFLSVLILLLLLHLKKLGMSEEQLERLKQQIEEVIESALEALRRGDETLAKLALLAMKVLFLSVQILKLLLELKRAGMSEEQLERLKQQIEEVIESALEALRRGDRKLAVLALLAMEVLFLSVQILKLLLELKRAGMSEEQLERLKQQIEEVIESALEALRRGDLRLAFEALELMLRLYTQVRQLKYS

SEQ ID NO: 447 - protein, 257 aa, synthetic construct
  REGION 1..257: note = Synthetic
ALVEELVTKVRIIFHLIELILHQLRQAGMSEEELERIKQQAEEITRWAIEAVRQGDPVLALVALLVMKVLLIFVQILKLLLELKQAGMSEEELERIKQQAEEITRWAIEAVRQGDPVLALVALLVMKVLLIFVQILKLLLELKQAGMSEEELERIKQQAEEITRWAIEAVRQGDPVLALVALLVMKVLLIFVQILKLLLELKQAGMSEEELERIKQQAEEITRWAIEAVRQGDPHLAHRALIIMLILLLIVIELKLS

SEQ ID NO: 448 - protein, 257 aa, synthetic construct
  REGION 1..257: note = Synthetic
DLVEHLVDEVRHIFRRIEYLLRELKRAGMSEEELERIKQQAEEITRWAIEAVRQGDPVLALVALLVMKVLLIFVQILKLLLELKQAGMSEEELERIKQQAEEITRWAIEAVRQGDPVLALVALLVMKVLLIFVQILKLLLELKQAGMSEEELERIKQQAEEITRWAIEAVRQGDPVLALVALLVMKVLLIFVQILKLLLELKQAGMSEEELERIKQQAEEITRWAIEAVRQGDPILAREALLYMLILLLHVRRLRHS

SEQ ID NO: 449 - protein, 257 aa, synthetic construct
  REGION 1..257: note = Synthetic
DEVETLVLRVKLIFFQIKHLLKELKQAGMSEEELERIKQQAEEITRWAIEAVRQGDPVLALVALLVMKVLLIFVQILKLLLELKQAGMSEEELERIKQQAEEITRWAIEAVRQGDPVLALVALLVMKVLLIFVQILKLLLELKQAGMSEEELERIKQQAEEITRWAIEAVRQGDPVLALVALLVMKVLLIFVQILKLLLELKQAGMSEEELERIKQEAERITREAIEAVRQGDPEKALKALLKMEFLLNLVLILKDS

SEQ ID NO: 450 - protein, 257 aa, synthetic construct
  REGION 1..257: note = Synthetic
ALVERLVYKVKITFNQILVFLLELELLGMSEEELERIKQQAEEITRWAIEAVRQGDPVLALVALLVMKVLLIFVQILKLLLELKQAGMSEEELERIKQQAEEITRWAIEAVRQGDPVLALVALLVMKVLLIFVQILKLLLELKQAGMSEEELERIKQQAEEITRWAIEAVRQGDPVLALVALLVMKVLLIFVQILKLLLELKQAGMSEEELERIKQQAEEITRWAIEAVRQGDPVLALVALLVMERLLHHVHALKVL

SEQ ID NO: 451 - protein, 257 aa, synthetic construct
  REGION 1..257: note = Synthetic
DLVERLVQQVELILYEIRFILNELKRAGMSEEELERIKQQAEEITRWAIEAVRQGDPVLALVALLVMKVLLIFVQILKLLLELKQAGMSEEELERIKQQAEEITRWAIEAVRQGDPVLALVALLVMKVLLIFVQILKLLLELKQAGMSEEELERIKQQAEEITRWAIEAVRQGDPVLALVALLVMKVLLIFVQILKLLLELKQAGMSEEELERIKQQAEEITRWAIEAVRQGDPKLAHHALLTMKELLLHVLRLKLN

SEQ ID NO: 452 - protein, 257 aa, synthetic construct
  REGION 1..257: note = Synthetic
DEVEELVLEVEIILRRIERLLKELKQAGMSEEELERIKQQAEEITRWAIEAVRQGDPVLALVALLVMKVLLIFVQILKLLLELKQAGMSEEELERIKQQAEEITRWAIEAVRQGDPVLALVALLVMKVLLIFVQILKLLLELKQAGMSEEELERIKQQAEEITRWAIEAVRQGDPVLALVALLVMKVLLIFVQILKLLLELKQAGMSEEELERIKQQAEEITRWAIEAVRQGDPVLARQALLQMEFLLLHVERLKRL

SEQ ID NO: 453 - protein, 225 aa, synthetic construct
  REGION 1..225: note = Synthetic
DRLEELTIRALSLIYEALLFLHRAGSPEFQEIYEEWERLKQKLEKASSEEEVRLLILTILALAWIALALAFLKRAGSPEFQEIYEEWERLKQKLEKASSEEEVRLLILTILALAWIALALMQLKEAGSPEFQEIYEEWERLKQKLEKASSEEEVRLLILTILALAWIALALMQLKEAGSPEFQEIYEEWERLKQKLEKASSEEEVRRLIQLILELAFRALTNVLS

SEQ ID NO: 454 - protein, 245 aa, synthetic construct
  REGION 1..245: note = Synthetic
LLKERQLKETARDLYKIIFELKDMGRPEARKIAQTAREIIERIEEALRNGDEEELKRLLKLAQLVKTMFELLQIVEQLKRMGRPEARKIAQTAREIIERILEALRNGDEEELKRLLKLAQLVKTMFELLQIVEQLKRMGRPEARKIAQTAREIIERILEALRNGDEEELKRLLKLAQLVKTMFELLQIVEQLKRMGRPEARKIAQTAREIIERILEALRNGDEKELRRLLILATVVKVLFELLRS

SEQ ID NO: 455 - protein, 245 aa, synthetic construct
  REGION 1..245: note = Synthetic
DEKENELRRTMVELFQIITELERMGRPEARKIAQTAREIIERILEALRNGDEEELKRLLKLAQLVKTMFELLQIVEQLKRMGRPEARKIAQTAREIIERILEALRNGDEEELKRLLKLAQLVKTMFELLQIVEQLKRMGRPEARKIAQTAREIIERILEALRNGDEEELKRLLKLAQLVKTMFELLQIVEQLKRMGRPEAREIAQTAREIIERILEALRNGDERLLHKLLLEAEYVKRLFELLEL

SEQ ID NO: 456 - protein, 222 aa, synthetic construct
  REGION 1..222: note = Synthetic
DELEELLNEIRILILNVLTLARDLGDPEVYEAAKQLLESAQEALQRGDFEKVRLITLLAQILLLILRVLHLARVLGDPEVYEAAKQLLESAQEALQRGDFEKVRLITLLAQILLLILHVLLQARILGDPEVYEAAKQLLESAQEALQRGDFEKVYLITLLAQILLLILLVLKLARELGDPEVYEAAKQLLESAQEALQRGDIEKVIEIYLLALRLLLRLERL

SEQ ID NO: 457 - protein, 245 aa, synthetic construct
  REGION 1..245: note = Synthetic
DEKEFELLRTVLELEYIVEQLKKMGRPEARKIAQTAREIIERILEALRNGDEEELKRLLKLAQLVKTMFELLQIVEQLKRMGRPEARKIAQTAREIIERILEALRNGDEEELKRLLKLAQLVKTMFELLQIVEQLKRMGRPEARKIAQTAREIIERILEALRNGDEEELKRLLKLAQLVKTMFELLQIVEQLKRMGRPRAREIAQLAREIIERILEALRNGDEELLLELLHLARIVKQQFELLQS

SEQ ID NO: 458 - protein, 254 aa, synthetic construct
  REGION 1..254: note = Synthetic
SEEEKKLTKIISLVLTIALELFERDPKDPQVKELLKTVEEIVRRALEALLNGDKETIEELFQQALLILLILLVLKHAQELYRRDPKDPQVKELLKTVKEIIRRAIEAIKNGDKETIEELFQQALLILLILLVLKHAQELYRRDPKDPQVKELLKTVKEIIRRAIEAIKNGDKETIEELFQQALLILLILLVLKHAQELYRRDPKDPQVKELLKTVKEIIRRAIEAIKNGDKETIEELFELARRILQHLELFKRS

SEQ ID NO: 459 - protein, 244 aa, synthetic construct
  REGION 1..244: note = Synthetic
SREEEEEKQMLELIRHALKAAQSSDPLAQQLFEEARRVVRTFLEAKQMGDEELLKKAHRELQEIILMIQLIEYALKAAQSSDPLAQQLFEEARRVVRTFLEAKQMGDEELLRKAFRELEEIIQMIQLIEYALKAAQSSDPLAQQLFEEARRVVRTFLEAKQMGDEELLEKAQRELEEIIQMIQLIEYALKAAQSSDPEAQQLFEEARRVVRTFLEAKQMGDERLLDHALLLLEKIIQMIHKVLS

SEQ ID NO: 460 - protein, 218 aa, synthetic construct
  REGION 1..218: note = Synthetic
AERILELIQELLQRLYEASRAGDHEKYQELEQFLEAAKQVLRAIKEAEELKKLGDPRALRIVELLLELVQRIVEAILAGDFEKMQELLQFLKAATQVLRAIKEAEELKKLGDPRALRIVELLLELVQRIVEAILAGDFEKMQELLQFLKAATQVLRAIKEAEELKKLGDPRALRIVELLLELVQRIVEAILAGDFEKMERLLLELLEALLRLLRIRHS

SEQ ID NO: 461 - protein, 218 aa, synthetic construct
  REGION 1..218: note = Synthetic
DEEIVELLRVLFERIREAELAGDEEKLEELLEFLQAAALVLHAISIALRLKRLGDPRALRIVELLLELVQRIVEAILAGDFEKMQELLQFLKAATQVLRAIKEAEELKKLGDPRALRIVELLLELVQRIVEAILAGDFEKMQELLQFLKAATQVLRAIKEAEELKKLGDPRALRIVELLLELVQRIVEAILAGDFEKMEHLLLELQRALLDLRQIKQS

SEQ ID NO: 462 - protein, 254 aa, synthetic construct
  REGION 1..254: note = Synthetic
DEYFFRFALEVLFLILHAYFLAYKSGDPELLQRIKEVLETAKELLELFLKSTDPEEMKRLYYLAFALSVLILILIAWFLAQQSGDPELLQRIKEVLETAKELVELFKESTDPEEMKRLYYLAFALSVLILILIAWFLAQQSGDPELLQRIKEVLETAKELVELFKESTDPEEMKRLYYLAFALSVLILILIAWFLAQQSGDPELLQRIKEVLETAKELVELFKESTDPEEMKRLYYLAEELLREIRRLKAYFES

SEQ ID NO: 463 - protein, 254 aa, synthetic construct
  REGION 1..254: note = Synthetic
SEEYIRFALEVLSEILFARYLALRSGDPELLQRIKEVLETAKELVELFERSTDPEEMKRLYYLAFALSVLILILIAWFLAQQSGDPELLQRIKEVLETAKELVELFKESTDPEEMKRLYYLAFALSVLILILIAWFLAQQSGDPELLQRIKEVLETAKELVELFKESTDPEEMKRLYYLAFALSVLILILIAWFLAQQSGDPELLQRIKEVLETAKELVELFKESTDPEEMKRLYYLAHRLLLTIRLLIDYFHS

SEQ ID NO: 464 - protein, 218 aa, synthetic construct
  REGION 1..218: note = Synthetic
LEEELLRELVKLLREYLEAVEEGDEEKLRKIEELIKVIRLALQAAKFAMQLMRQGDPLAEELLRELQKLIEQSQEAKEAGDEEKLRKINELIKVIVLAIQAAWFAMQLMRQGDPLAEELLRELQKLIEQSQEAKEAGDEEKLRKINELIKVIVLAIQAAWFAMQLMRQGDPTAEELLRELQKLIEQSQEAKEAGDEEKLRKINKRIKHIVYRIFTAFD

SEQ ID NO: 465 - protein, 249 aa, synthetic construct
  REGION 1..249: note = Synthetic
DEELELFLVILRALYVLNQVLRETGSPVIENLLEQARRLYHELEEALKRGDMEKAREIMEKVQLLLTIALALQTLFEVYRQTGSPVIKNLLEQAKRLAQELIEALKRGDMEKAREIMEKVQLLLTIALALQTLFEVYRQTGSPVIKNLLEQAKRLAQELIEALKRGDMEKAREIMEKVQLLLTIALALQTLFEVYRQTGSPEIKNLLEQAKRLAQELIEALKRGDMEKAREIMEKVQLLLRRAEAILNH

SEQ ID NO: 466 - protein, 249 aa, synthetic construct
  REGION 1..249: note = Synthetic
SEEYRLKLVIFRALVTLFEVLEETGSPVIKNLLEQAKRLHQELIEALKRGDMEKAREIMEKVQLLLTIALALQTLFEVYRQTGSPVIKNLLEQAKRLAQELIEALKRGDMEKAREIMEKVQLLLTIALALQTLFEVYRQTGSPVIKNLLEQAKRLAQELIEALKRGDMEKAREIMEKVQLLLTIALALQTLFEVYRQTGSPEIKNLLEEAKRLAQELIEALKRGDHEKAHKIIVLVLYLLEIARRRQTS

SEQ ID NO: 467 - protein, 222 aa, synthetic construct
  REGION 1..222: note = Synthetic
DRLEELLLEIRKLIHRVEFYARRLGDPEVYEAAKQLLESAQEALQRGDFEKVRLITLLAQILLLILLVLKLARELGDPEVYEAAKQLLESAQEALQRGDFEKVRLITLLAQILLLILLVLKLARELGDPEVYEAAKQLLESAQEALQRGDFEKVRLITLLAQILLLILLVLKLARELGDPEVYEAAKQLLESAQEALQRGDFEKVHRIFYLALILLLILESL

SEQ ID NO: 468 - protein, 242 aa, synthetic construct
  REGION 1..242: note = Synthetic
DILVHQALQLAAQISLIAQELFFRTGDPEAQKIAEIAQELFERVLENGKDEEELKLIILLLQAMLLAVQIIYYAEELYRRTGDPEAQKISEIAKELLQRVVENGKDEEELKLIILLLQAMLLAVQIIKYAEELYRRTGDPEAQKISEIAKELLQRVVENGKDEEELKLIILLLQAMLLAVQIIKYAEELYRRTGDPEAQKISEIAKELLQRVVENGKDEEELKRIIEELNELLLRVQLLKKS

SEQ ID NO: 469 - protein, 196 aa, synthetic construct
  REGION 1..196: note = Synthetic
SELLYRVRYYLLEAIRLAKKQGDEEVIEQLRELMQQAIETFEEGDEERLKQSLLLVQVLYYLLVAIELAKKQGDEEVIEQLRELMQQAIETFEEGDEERLKQSLLLVQVLYYLLVAIELAKKQGDEEVIEQLRELMQQAIETFEEGDEHRLRESLNLVRLLVTLLRLIELAKRIGDEKRIKRIRELMQQIIKLFES

SEQ ID NO: 470 - protein, 233 aa, synthetic construct
  REGION 1..233: note = Synthetic
SEQEEALEILFKLLRLLLFAEKYMSEEQVQKLKESVKRASELARRFIHTGDPRYLEQMEALTILVELLILLWYAKQYMSEEQVQKLKESVKRASELAERFWQTGDPRYLEQMEALTILVELLILLWYAKQYMSEEQVQKLKESVKRASELAERFWQTGDPRYLEQMEALTILVELLILLWYAKQYMSEEQVRILKELVKHASELAERFWQTGDPRFLEIMKQLTEAVKSLIHS

SEQ ID NO: 471 - protein, 253 aa, synthetic construct
  REGION 1..253: note = Synthetic
DELEYLLLRLEVIVDLVKSIARILQRILGDPRAQELAEQAFELLERAIRVAKEGDKEKIELMYLLLLLLLIVLEVLFLAFFLQRVLGDPRAQELAEQAFELLERAIRVAKEGDKEKIELMYLLLLLLLIVLLVLQLAYRLQKELGDPRAQELAEQAFELLERAIRVAKEGDRHKIFLMFLLLLLLLIVLLVLLLAFRLQKELGDPRAQELAEQAFELLERAIRVAKEGDEEKIHEMYELLLRLLLRLEHLLKS

SEQ ID NO: 472 - protein, 238 aa, synthetic construct
  REGION 1..238: note = Synthetic
SEQEERILKLALQLEVLARFLEEITGSKEYAEEAREMAQLAREAARSGDEEKLRRYEQLLRIVFLALLLVELAVRLEQKTGSKEYAEEAREMAQLAIEAAKSGDEEKLRRYEQLLRIVFLALLLVELAVTLEQKTGSKEYAEEAREMAQLAIEAAKSGDEEKLRRYEELLRIVFLALLLVELAVTLEQKTGSKEYAEEAREMAQLAIEAAKSGDHEKLSHYYARLIYLFLKLEYVERS

SEQ ID NO: 473 - protein, 282 aa, synthetic construct
  REGION 1..282: note = Synthetic
DIREEEVLELALEAEVLIRRLKTLAERNGDPKLFKELYEIARFALELVKRAEQLVRSENEEDLEEAIRILEVAILALIAMLLIILLKQYAERNGDPKLFKELYEIARFALELVKRALQLVQSENEEDLEEAIRILEVAILALIAMLLIILLKQYAERNGDPKLFKELYEIARFALELVKRALQLVQSENEEDLEEAIRILEVAILALIAMLLIILLKQYAERNGDPKLFKELYETARFALELVKRALQLVQSENEEDLEEAIRILEQAVRLLRSAHLNIEYK

SEQ ID NO: 474 - protein, 282 aa, synthetic construct
  REGION 1..282: note = Synthetic
DREELEVQRLALEAKALIDLLKRIAEQNGDPKLFKELYEIARFALELVKRALQLVQSENEEDLEEAIRILEVAILALRAMLLIILLKLLAELNGDPKLFKELYEIARFALELVKRALQLVQSENEEDLEEAILILEVAILALIAMELIILLKQYAERNGDPKLFKELYEIARFALELVKRALQLVQSENSEDLLEAQLILLVAILALIAMLLIILLKQYAERNGDPKLFKELYEIARFALELVKRALQLVQSENEEDLIEALRLLHEALIRLRIMLFRIRQS

SEQ ID NO: 475 - protein, 282 aa, synthetic construct
  REGION 1..282: note = Synthetic
SEREQEVLRLALHAIFLIQELKDLARENGDPKLFKELYEIARFALELVKRALQLVQSENEEDLEEAIRILEVAILALIAMLLIILLKQYAERNGDPKLFKELYEIARFALELVKRALQLVQSENEEDLEEAIRILEVAILALIAMLLIILLKQYAERNGDPKLFKELYEIARFALELVKRALQLVQSENEEDLEEAIRILEVAILALIAMLLIILLKQYAERNGDPKLFKELYEIARFALELVKRALQLVQSENEEDLEEAKLILLEAVTKLKLMLLRIKTS

SEQ ID NO: 476 - protein, 254 aa, synthetic construct
  REGION 1..254: note = Synthetic
SERILKLLLRVLLLIYELKLLAEEQGDEEMKELVELILQIVLKAQRLVRQGKDLEEAETLARIALLLLEVALLIIELKRLAQQQGDEEMKELVELILQIVLKAIRLVKQGKDLEEAETLARIALLLLEVALLIIELKRLAQQQGDEEMKELVELILQIVLKAIRLVKQGKDLEEAETLARIALLLLEVALLIIELKRLAQQQGDEEMKELVELILQIVLKAIRLVKQGKDLEEAEELARRAKQLLEIALTLIRL

SEQ ID NO: 477 - protein, 255 aa, synthetic construct
  REGION 1..255: note = Synthetic
LEELENLEDLIRTLARLVELLARQAGDPELIRIAQEVLEYLSEILKKVRESTDEEQMRRLLELALLIVLIATIAALVFILAKQAGDPELIRIAQEVLEYLSEILKKVRESTDEEHMRLLLRLALLIVLIAYIAALVFILAKQAGDPELIRIAQEVLEYLSEILKKVRESTDYLHMYLLLLLALLIVLIAYIAALVFILAKQAGDPELIRIAQEVLEYLSEILKKVRESTDLEHMLRLLIQALIIVIKAYIYALLF

SEQ ID NO: 478 - protein, 255 aa, synthetic construct
  REGION 1..255: note = Synthetic
LEELERLETRIRNIAREVRELAEYAGDPELIRIAQEVLEYLSEILKKVRESTDEEQMRRLLELALLIVLIAYIAALVFILAKQAGDPELIRIAQEVLEYLSEILKKVRESTDEEQMRRLLELALLIVLIAYIAALVFILAKQAGDPELIRIAQEVLEYLSEILKKVRESTDEEQMRRLLYLAELIVRIAYIAALVFILAKQAGDPELIRIAQEVLEYLSEILKKVRESTDEKHMLRLLAEALAIVTRAFILAQID

SEQ ID NO: 479 - protein, 250 aa, synthetic construct
  REGION 1..250: note = Synthetic
VLKTEKIERLAQELLLLAHRLEIFAGDSVAKEIYETVKEMLEQFREALQRGDEETSRKVLKTLKILYLALRLLLLALELLEKAGDSVAKEIYETVKEMLEQFREALQRGDEETSRKVLKTLKILYLALRLLLLALELLQKAGDSVAKEIYETVKEMLEQFREALQRGDEETSRKVLKTLEILYLALRLLLLALELLQKAGDSVAKEIYETVKEMLEQFREALQRGDEETSRKVLEVLYQLYVELVLLLRS

SEQ ID NO: 480 - protein, 254 aa, synthetic construct
  REGION 1..254: note = Synthetic
DELELLLVRAEALAHQIEFLARELGDEELLEVAQEMIEFILQVLQFAKEATDMEEARRQLELALLLVLALYLALLIFFIALELGDEELLEVAQEMIEFILQVLQFAKEATDMEEARRQLELALLLVLALYLALRIFLLAKRLGDEELLEVAQEMIEFILQVLQFAKEATDMEEARRQLELALLLVLALYLALKIFELAKRLGDEELLEVAQEMIEFILQVLQFAKEATDMEEARRQLKEALRLVKKLYTELEDS

SEQ ID NO: 481 - protein, 254 aa, synthetic construct
  REGION 1..254: note = Synthetic
DELRILLLHAEFLAELIFELAKNLGDEELLEVAQEMIEFILQVLQFAKEATDMEEARRQLELALLLVLALYLALLIFELALLLGDEELLEVAQEMIEFILQVLQFAKEATDMEEALRQLFLALLLVLALYLALRIFQLAKKLGDEELLEVAQEMIEFILQVLQFAKEATDRREALRQLYLALLLVLALYLALKIFELAKHLGDEELLEVAQEMIEFILQVLQFAKEATDMEEAQRQLEEALNLVHRLYFELRVH

SEQ ID NO: 482 - protein, 254 aa, synthetic construct
  REGION 1..254: note = Synthetic
DELEELIVKIESLVRLFEIFARQAGDPRLLELAREVLEYVLQMIQLAKTATDEEEIRKLLELALLIVLIALLVARFFVLAQRAGDPRLLELAREVLEYVLQMIQLAKTATDEEEIRKLLELALLIVLIALLVALFFELAQKAGDPRLLELAREVLEYVLQMIQLAKTATDEEEIRKLLRLALLIVKIALLVALFFELAQKAGDPRLLELAREVLEYVLQMIQLAKTATDEEEIKELLERALELVTRALTRAELS

SEQ ID NO: 483 - protein, 254 aa, synthetic construct
  REGION 1..254: note = Synthetic
DELEYLQIEILVLVYAFELFARLAGDPRLLELAREVLEYVLQMIQLAKTATDEEEIRKLLELALLIVLIALLVARFFTLARIAGDPRLLELAREVLEYVLQMIQLAKTATDEEEIRKLLELALLIVLIALLVALFFILAQKAGDPRLLELAREVLEYVLQMIQLAKTATDEEEIRKLLELALLIVKIALLVALFFELAQKAGDPRLLELAREVLEYVLQMIQLAKTATDEEEIRKLLEEALRLVLEALIEADIS

SEQ ID NO: 484 - protein, 260 aa, synthetic construct
  REGION 1..260: note = Synthetic
DERIELIIEVLLLLLIISELLRRVKLLGVDPEDIEEIRQLFEKVEELLERAQKASSLEEAKLLLLIALVLAFLAIILSLLARVKLLGVDPEDIEEIRQLMEKVLELVQRARKASSLEEAKLLLLIALVLAFLAIILSLLARVKLLGVDPEDIEEIRQLMEKVLELVQRARKASSLEEAKLLLLIALVLAFLAIILSLLARVKLLGVDPTIIKLIEIYMELVLELVQRARKASSLEEAKLLLLRALELALHAIFLSLSARS

SEQ ID NO: 485 - protein, 260 aa, synthetic construct
  REGION 1..260: note = Synthetic
SELERLIQRVLQLLVIIYFLLIEVKRLGVDPEDIEEIRQLMEKVKELVERALKASSLEEAKLLLLIALVLAFLAIILSLLARVKLLGVDPEDIEEIRQLMEKVLELVQRARKASSLEEAKLLLLIALVLAFLAIILSLLARVKLLGVDPEDIEEIRQLMEKVLELVQRARKASSLEEAKLLLLIALVLAFLAIILSLLARVKLLGVDPSLIENIRRLMEQVLELVQRARKASSLEEAKLLLERAERLALAALFISHVAQL

SEQ ID NO: 486 - protein, 233 aa, synthetic construct
  REGION 1..233: note = Synthetic
SEVERLLALADFFISLVEQRMRETGDEKLRELWEEARKLSEEAQELLEAGDLESARVIILLAIAIVFILQVFYLMQQTGDEKLRELWEEARKLSEEARELFEAGDLESARVIILLAIAIVFILQVFYLMQQTGDEKLRELWEEARKLSEEARELFEAGDLESARVIILLAIAIVFILQVFYLMQQTGDERLREEWEEARKLSEEARELFEAGDLEQAREIIRKAIYIVLFLQN

SEQ ID NO: 487 - protein, 249 aa, synthetic construct
  REGION 1..249: note = Synthetic
DEIENELFELVLRALELIYHLRNSSNPELQEIAQQAIEELKEMLERAKRVSEEELKRILIFVILLLLVLKALELIRKLLKSSNPELQEIAQQAIEELKEMLERAKRVSEEELKRILIFVILLLLVLKALELIRKLLKSSNPELQEIAQQAIEELKEMLERAKRVSEEELKRILIFVILLLLVLKALELIRKLLKSSNPELQEIAQQAIEELKEMLERAKRVSEEELHHILLLVLVILLQLEVLETRLEL

SEQ ID NO: 488 - protein, 262 aa, synthetic construct
  REGION 1..262: note = Synthetic
DELEEHVFRFIALLEVILRLLKELVEKYGDPEAREILELAKRAMEFLSRVLQLGDEEKLKLALLIAQVVKYIYRLWEELQELKELVEKYGDPEAREILELAKRAMEFLSRVIQLGDEEKLKLALLIAQVVLYIFRLWQELQELKELVEKYGDPEAREILELAKRAMEFLSRVIQLGDEEKLKLALLIAQVVLYIFRLWQELQELKELVEKYGDPEAREILELAKRAMEYLSRVIQLGDERKLRHALLIAQQVLTQFRRFELS

SEQ ID NO: 489 - protein, 201 aa, synthetic construct
  REGION 1..201: note = Synthetic
SEEENRALELAFSLELIAKEAEEYYEKTGDPTYQEISEVAKQIVREILQAVKRGDEESIRKLQEMAEAVLLAFELSEIARLAEEYYEKTGDPTYQEISEVAKQIVREILQAVKRGDEESIRKLQEMAEAVLLAFELSEIARLAEEYYEKTGDPTYQEISEVAKQIVREILQAVKRGDEKSIRHLFQLALRVLLEFRLSRLS

SEQ ID NO: 490 - protein, 224 aa, synthetic construct
  REGION 1..224: note = Synthetic
SRLEKLAIEAEIFIRIVELLAKIAGDPELSESAQRIMRIALKALLAGNEEELRLVLLAARAILLIVQVYLLALEAGDPELSESAQRIMRIALKALLAGNEEELRLVLLAARAILLIVQVYLLAKEAGDPELSESAQRIMRIALKALLAGNEEELRLVLLAARAILIIVQVYLLAKEAGDPELSESAQRIMRIALKALLAGNREELYKVLSDANHILTEVELRLS

SEQ ID NO: 491 - protein, 202 aa, synthetic construct
  REGION 1..202: note = Synthetic
TDEDILRVLEEIVRRYFEALRRGDEESIRKLQEMAEAVRLARELSEIARLAEEYYEKTGDPTYQEISEVAKQIVREILQAVKRGDEESIRKLQEMAEAVLLAFELSEIARLAEEYYEKTGDPTYQEISEVAKQIVREILQAVKRGDEESIRKLQEMAEAVLLAFELSEIARLAEEYYEKTGDPTFELISKYARLLVHQILQA

SEQ ID NO: 492 - protein, 284 aa, synthetic construct
  REGION 1..284: note = Synthetic
KEEKRQNREVLKFLELINLALILVLLLQLEAGDETAQELIEELKELEELVKELLRSYRQYGDEEAKEKMRQITEVAKFLLLIILALLLVYELKQKAGDETAQELIEELKELVELVKELLRSYRQYGDEEAKEKMRQITEVAKFLLLIILALLLVYELKQKAGDETAQELIEELKELVELVKELLRSYRQYGDEEAKEKMRQITEVAKFLLLIILALLLVYELKQKAGDETAQELIEELKELVELVKELLRSYRQYGDEEAKEKMRQITHRAEQLFHQIRSLLLS

SEQ ID NO: 493 - protein, 284 aa, synthetic construct
  REGION 1..284: note = Synthetic
SEELKQEELVIEFEYLIQRAEFLVKLLKELAGDETAQELIEELKELVELVKELLRSYRQYGDEEAKEKMRQITEVAKFLLLIILALLLVYELKQKAGDETAQELIEELKELVELVKELLRSYRQYGDEEAKEKMRQITEVAKFLLLIILALLLVYELKQKAGDETAQELIEELKELVELVKELLRSYRQYGDEEAKEKMRQITEVAKFLLLIILALLLVYELKQKAGDETAQELIEELKELVELVKELLRSYRQYGDEEAKRIMHHITNEAELLLTRIQTLLES

SEQ ID NO: 494 - protein, 284 aa, synthetic construct
  REGION 1..284: note = Synthetic
SEEERQRREVTKFEELIARALVLVRSLKDLAGDETAQELIEELKELEELVKELLRSYEQYGDEEAKEKMRQITEVAKFLLLIILALLLVYELKRKAGDETAQELIEELKELVELVKELLRSYRQYGDEEAKEKMRQITEVAKFLLLIILALLLVYELKQKAGDETAQELIEELKELVELVKELLRSYRQYGDEEAKEKMRQITLVAKFLLLIILALLLVYELKQKAGDETAQELIEELKELVELVKELLRSYRQYGDEEAKKKMHRITFRARELLTRIELLLRS

SEQ ID NO: 495 - protein, 265 aa, synthetic construct
  REGION 1..265: note = Synthetic
SKREETFEKLFELLYLVLLLAARIYVRFGDPTARLANELARENLKQVEEMHRAGDEEQFEQVKRLITFAKLLLLLLLVILLASRIFERFGDPTARLALELASENIKQVLEMTRAGDEEQFEQVKRLITFAKLLLLLLLVILLASRIFERFGDPTARLALELASENIKQVLEMTRAGDEEQFEQVKRLITFAKLLLLLLLVILLASRIFERFGDPTARLALELASENIKQVLEMTRAGDEEQFEQVKRLIRIAERLLLYLRAVFVS

SEQ ID NO: 496 - protein, 265 aa, synthetic construct
  REGION 1..265: note = Synthetic
SELDRLFIELFRLLIEVLELAEKIFRRFGDPTARLAYELARENLQQVLENLYRGDEEQFEQVKRLITFAKLLLLLLLVILLASRIFERFGDPTARLALELASENIKQVLEMTRAGDEEQFEQVKRLITFAKLLLLLLLVILLASRIFERFGDPTARLALELASENIKQVLEMTRAGDEEQFEQVKRLITFAKLLLLLLLVILLASRIFERFGDPTARLALELASENIKQVLEMTRAGDEEQFEQVRRLIERAELLLQYLEHVLKS

SEQ ID NO: 497 - protein, 265 aa, synthetic construct
  REGION 1..265: note = Synthetic
DKLLETFIELFRLLALVLVLAIQIIYQFGDPTARLAHELASENLKQVREMLRAGDEEQFEQVKRLITFAKLLLLLLLVILLASRIFERFGDPTARLALELASENIKQVLEMTRAGDEEQFEQVKRLITFAKLLLLLLLVILLASRIFERFGDPTARLALELASENIKQVLEMTRAGDEEQFEQVKRLITFAKLLLLLLLVILLASRIFERFGDPTARLALELASENIKQVLEMTRAGDEEQFEQVKRLILIAERLLHELRIVLES

SEQ ID NO: 498 - protein, 254 aa, synthetic construct
  REGION 1..254: note = Synthetic
SERIFELLELIKEIIQLVEQLFFHTGDPEFLEMARRLKEQFEEAKKQAEKLGEEEALKRLRIILLLALIVLIIVQVTLLYQQTGDPEFLEMARRLKEQFEEAKKQAEKLGEEEALKRLRIILLLALIVLIIVQVTLLYQQTGDPEFLEMARRLKEQFEEAKKQAEKLGEEEALKRLRIILLLALIVLIIVQVTLLYQQTGDPEFLEMARRLKEQFEEAKKQAEKLGEEEARFLLLHILIEAESVLQHVRLRLEH

SEQ ID NO: 499 - protein, 253 aa, synthetic construct
  REGION 1..253: note = Synthetic
SELEELFLEIHLLIEFVRVLAEFLGDPQLLEIAQKMLELLLEVKRYLEAGDEEKVRKLLELALLSALIAYLIAYVTFLAIQLGDPQLLEIAQKMLELLLEVLRYQEAGDEEKVRKLLELALLSALIAYLIAYVTRLAKELGDPQLLEIAQKMLELLLEVLRYQEAGDEEKVRKLLELALLSARIAYLIAYVTRLAKELGDPQLLEIAQKMLELLLEVLRYQEAGDEEKVRKLLELALRSAIRAYLEAYYTKLS

SEQ ID NO: 500 - protein, 253 aa, synthetic construct
  REGION 1..253: note = Synthetic
DELELLSHRIEFLIRYVERLAKELGDPQLLEIAQKMLELLLEVLRYQEAGDEEKVRKLLELALLSALIAYLIAYVTRLAKELGDPQLLEIAQKMLELLLEVLRYQEAGDERKVRHLLYLALLSALIAYLIAYVTRLAKELGDPQLLEIAQKMLELLLEVLRYQEAGDEEKVKELLFLALLSALIAYLIAYVTRLAKELGDPQLLEIAQKMLELLLEVLRYQEAGDEEKVHELLARALLDALRAFETAHLTRLS

SEQ ID NO: 501 - protein, 224 aa, synthetic construct
  REGION 1..224: note = Synthetic
LRLVKLAKEAKELILLVEVLAYIAGDPELSESAQRIMRIALKALLAGNEEELRLVLLAARAILLIVQVYLLAVRAGDPELSESAQRIMRIALKALLAGNEEELRLVLLAARAILLIVQVYLLAKEAGDPELSESAQRIMRIALKALLAGNEEELRLVLLAAKAILFIVQVYLLAKEAGDPELSESAQRIMRIALKALLAGNREELIEVLFQAQRLLTEVEYKLS

SEQ ID NO: 502 - protein, 256 aa, synthetic construct
  REGION 1..256: note = Synthetic
SEELEFRRLLLEVSKLVTEVEYIAEETGDEKLLEIARQVLEQLLQAFEIFQAGDKEKARETIQFLLLLALVAWLVAEVSRIAKETGDEKLLEIMRQVLEQLLQAFEIFQAGDKEKARETIQFLLLLALVAWLVAEVSRIAKETGDEKLLEIMRQVLEQLLQAFEIFQAGDKEKARETIQFLLLLALVAWLVAEVSRIAKETGDEKLLEIMRQVLEQLLQAFEIFQAGDKEKARETIRELRFLALRAFSEAELSREH

SEQ ID NO: 503 - protein, 256 aa, synthetic construct
  REGION 1..256: note = Synthetic
DEELEFERLLNEVSELVIYVSEIARRTGDEKLLEIMRQVREQLLQAFEIFQAGDKEKARETIQFLLLLALVAWLVAEVSRIAKETGDEKLLEIMRQVLEQLLQAFEIFQAGDKEKARETIQFLLLLALVAWLVAEVSRIAKETGDEKLLEIMRQVLEQLLQAFEIFQAGDKEKARETIQFLLLLALVAWLVAEVSRIAKETGDEKLLEIMRQVLEQLLQAFEIFQAGDKEKARETIQFLLELAERAFIQAEFVEHS

SEQ ID NO: 504 - protein, 256 aa, synthetic construct
  REGION 1..256: note = Synthetic
DEENEFRKLLLHVEYLVLLVEEIARRTGDEKLLEIMRQVLEQLLQAFEIFQAGDKEKARETIQFLLLLALVAWLVAEVSRIAKETGDEKLLEIMRQVLEQLLQAFEIFQAGDKEKARETIEFLLLLALVAWLVAEVSRIAKETGDEKLLEIMRQVLEQLLQAFEIFQAGDKEKAHETIEFLHNLALVAWLVAEVSRIAKETGDEKLLEVMRQVLEQLLQAFEIFQAGDKEKARETIERLLRLAYYAFQIAEESRRS

SEQ ID NO: 505 - protein, 250 aa, synthetic construct
  REGION 1..250: note = Synthetic
DEKAHRLLERAQLLLTRLEQLLLEANSEEVKEAIEIIRRLIEEATEAYERGDLEKLLKVLKAIVLMIEALRLLQQLLQTLREANSEEVKEAIEIIRRLIEEATEAFQRGDLEKLLKVLKAIVLMIEALRLLQQLLQTLREANSEEVKEAIEIIRRLIEEATEAFQRGDLEKLLKVLKAIVLMIEALRLLQQLLQTLREANSEFVKEAIERIRRIIEEATEAFQRGDLEKLLKVLKRIVRLIRVLIELIEL

SEQ ID NO: 506 - protein, 250 aa, synthetic construct
  REGION 1..250: note = Synthetic
SEKAIELISRALSLLNRLRYLLEHANSEEVKEAIEIIRRLIEEATEAFQRGDLEKLLKVLKAIVLMIEALRLLQQLLQTLREANSEEVKEAIEIIRRLIEEATEAFQRGDLEKLLKVLKAIVLMIEALRLLQQLLQTLREANSEEVKEAIEIIRRLIEEATEAFQRGDLEKLLKVLKAIVLMIEALRLLQQLLQTLREANSEFVKEAIERIRRLIEEATEAFQRGDLEKLELVLQLIVFLIKLLRRLTES

SEQ ID NO: 507 - protein, 249 aa, synthetic construct
  REGION 1..249: note = Synthetic
DEIIREVNAILLLIRDLVKQLEKQGLAETARQFKETAQRIYELVKKAEESGDEETLERALRMAQVLYLLLLIFLTVKKLEEQGLAETARQFKETAQRIYELVKKAQESGDEETLERALRMAQVLLLLLRIFETVKKLEEQGLAETARQFKETAQRIYELVKKAQESGDEETLERALLMAQVLLLLLRIFETVKKLEEQGLAEVARQFKETAQRIYELVKKAQESGDEQLLFEAFVLALYLLERLRLYER

SEQ ID NO: 508 - protein, 168 aa, synthetic construct
  REGION 1..168: note = Synthetic
FEELKEILEQLRRTFEKAVRMGDYEAVLHLARILIELARRMGDFETMRQLLEELKQLFREAKRMGDYELVLQIAEVLIKIARAMGDFETMRQLLEELKQLFREAKRMGDYELVLQIAEVLIKIARAMGDFETMRQLLEELKQLFREAKRMGDEELVTLIHYVLILIES

SEQ ID NO: 509 - protein, 266 aa, synthetic construct
  REGION 1..266: note = Synthetic
DELLFEVQVLLLLIELLRRRIEKTAEDPRYAQEVREIVQKAKEAIQRIKELLENGDEEEAKILALLVRVLWLLASIILLMLIIERTAEDPRYAQEVREIVQKAKEAIQRIEELFKNGDEEEAKILALLVRVLWLLASIILLMLIIERTAEDPRYAQEVREIVQKAKEAIQRIEELFKNGDEEEAKILALLVRVLWLLASIILLMLIIERTAEDPRLAQEVREIVQKAKEAIQRIEELFKNGDEEEAKRLARLVEYLHNLAKLILHL

SEQ ID NO: 510 - protein, 253 aa, synthetic construct
  REGION 1..253: note = Synthetic
DQVERIARRIEQIISEIEEFLYLLRKRGNPEQAEKMERLAEEVQQFAKEALELGDLETLQVALIAIQIILIIVRILEFLERLKKRGNPEQAEKMERLAEEVQQFAKEALELGDLETLQVALIAIQIILIIVRILEFLERLKKRGNPEQAEKMERLAEEVQQFAKEALELGDLETLQVALIAIQIILIIVRILEFLERLKKRGNPEQAEKMERLAEEVQQFAKEALELGDERLLRKALLLILIILLLVRIHLTS

SEQ ID NO: 511 - protein, 253 aa, synthetic construct
  REGION 1..253: note = Synthetic
DRLEQIATRIRLIILEIEEFLKRLKKRGNPEQAEKMERLAEEVQQFAKEALELGDLETLQVALIAIQIILIIVRILEFLERLKKRGNPEQAEKMERLAEEVQQFAKEALELGDLETLQVALIAIQIILIIVRILEFLERLKKRGNPEQAEKMERLAEEVQQFAKEALELGDLETLQVALIAIQIILIIVRILEFLERLKKRGNPEQAEKMERLAEEVQQIAKEALELGDRYLLKIALLLILIILLLVRRLLES

SEQ ID NO: 512 - protein, 224 aa, synthetic construct
  REGION 1..224: note = Synthetic
SEMEQLAARVLILALLVYILVLEAGDPQLEESAKRLRESAMEALKAGDEESLKMALLAARVLYFAVLVYLLVQEAGDPQLLESAKRLIESAMEALKAGDEESLKMALLAARVLYFAVLVYLLVQEAGDPQLLESAKRLIESAMEALKAGDEESLKMALLAARVLYFAVLVYLLVQEAGDPQLLESAKRLIESAMEALKAGDEESLRRALTEARLLFLRVEQILS

SEQ ID NO: 513 - protein, 235 aa, synthetic construct
  REGION 1..235: note = Synthetic
DDFLYRVKIEIEFLYKQIWKMAQRIDPEELQRLRELAKKAIETVEEALRRGDETLAFLALVLILIIYYYAQIWEMAQRIDPEELQRLRELAKKAIETVEEALRRGDETLAFLALVLILIIYYYAQIWEMAQRIDPEELQRLRELAKKAIETVEEALRRGDERLAFLALVLILIIYYYAQIWEMAQRIDPEDLQRLREEAKKAIETVEEALRRGDERLAYRALFLIQLIYILARLH

SEQ ID NO: 514 - protein, 256 aa, synthetic construct
  REGION 1..256: note = Synthetic
SQFTELLLIILRIYILVVELAVRIQSEGDEEAYEEAREAAQKIKELFEEVRRSGDLETAQFMTLLAQILLIYITVLFLAYQIKKQGDEEAYEEAREAAQKIKELFEEVKRSGDLETAQFMTLLAQILLIYITVLFLAYQIKKQGDEEAYEEAREAAQKIKELFEEVKRSGDLETAQFMTLLAQILLIYITVLFLAYQIKKQGDEEAYEHAREAAQKIKELFEEVKRSGDLETAEHLTRQARNLLQLIETLFRKYQE

SEQ ID NO: 515 - protein, 256 aa, synthetic construct
  REGION 1..256: note = Synthetic
DQFDELLFLIILIYLLVRRLARQIKKQGDEEAYEEAREAAQKIRELFEEVHRSGDLETAQFMTLLAQILLIYITVLFLAYQIKKQGDEEAYEEAREAAQKIKELFEEVKRSGDLETAQFMTLLAQILLIYITVLFLAYQIKKQGDEEAYEEAREAAQKIKELFEEVKRSGDLETAQFMTLLAQILLIYITVLFLAYQIKKQGDEEAYELAREAAQKIKELFEEVKRSGDLETAQFMTLLAQRLLKHIEEFFRFYQS

SEQ ID NO: 516 - protein, 256 aa, synthetic construct
  REGION 1..256: note = Synthetic
DEFEELLRLILQIYANVLALAIHIKDQGDEEAYEEAREAAQKIHELYREVRRSGDLETAQFMTLLAQILLIYITVLFLAYQIKKQGDEEAYEEAREAAQKIKELFEEVKRSGDLETAQFMTLLAQILLIYITVLFLAYQIKKQGDEEAYEEAREAAQKIKELFEEVKRSGDLETAEFMTLLAQILLIYITVLFLAYQIKKQGDEEAYEEAREAAQKIKELFEEVKRSGDLETARQMTIEARLLLIRIEHQFRHYHS

SEQ ID NO: 517 - protein, 256 aa, synthetic construct
  REGION 1..256: note = Synthetic
AQFETLLRQILEIFTRVEHLARHIKEQGDEEAYEEAREAAQKIHELFEEVKRSGDLETAQFMTLLAQILLIYITVLFLAYQIKKQGDEEAYEEAREAAQKIKELFEEVKRSGDLETAQFMTLLAQILLIYITVLFLAYQIKKQGDEEAYEEAREAAQKIKELFEEVKRSGDLETAQFMTLLAQILLIYITVLFLAYQIKKQGDEEAYEEAREAAQKIKELFEEVKRSGDLETAERMTQQARILLQRIEVLFEEYAS

SEQ ID NO: 518 - protein, 254 aa, synthetic construct
  REGION 1..254: note = Synthetic
SAKVASLARFIHELFNEAETLARLISEQGSQEDFEKAQRLLEEVLRTVKEALETGDEESAKVASLAAFIILMFLRAVRQAQEISQQGSQEDFEKAQRLLEEVLRTVKEALETGDEESAKVASLAAFIILMFLEAVKQAQEISQQGSQEDFEKAQRLLEEVLRTVKEALETGDEESAKVASLAAFIILMFLEAVKQAQEISQQGSQEDFEKAQRLLEEVLRTVKEALETGDERLARRASLLAYLILLFLELVKLS

SEQ ID NO: 519 - protein, 254 aa, synthetic construct
  REGION 1..254: note = Synthetic
SEKVAKLAEEIELLYLEAEHIARRISQQGSQEDFEKAQRLLEEVLRTVKEALETGDEESAKVASLAAFIILMFLRAVQQAQEISQQGSQEDFEKAQRLLEEVLRTVKEALETGDEESAKVASLAAFIILMFLEAVKQAQEISQQGSQEDFEKAQRLLEEVLRTVKEALETGDEESAKVASLAAFIILMFLEAVKQAQEISQQGSQEDFEKAQRLLEEVLRTVKEALETGDERKALEAFDAALRILTFLRLVKLS

SEQ ID NO: 520 - protein, 261 aa, synthetic construct
  REGION 1..261: note = Synthetic
DELETLLIRAKILAQQAALLARYILEKATSPEIKQIVKELIRLIQKIVERAERATDEEEIKLMILLILAIATAVLAALEALLILLKATSPEIKQIVKELIRLIQKIVERAERATDEEEIKLMILLILAIATAVLAALLALEILMKATSPEIKQIVKELIRLIQKIVERAERATDEEEIKLMILLILAIATAVLAALLALEILMKATSPEIKQIVKELIRLIQKIVERAERATDEEEIKLMILLIERLALQVLATLFQLLVS

SEQ ID NO: 521 - protein, 261 aa, synthetic construct
  REGION 1..261: note = Synthetic
DELESRLVEAKSQAHAALLLAEFILRKATSPEIKQIVKELIRLIQKIVERAERATDEEEIKLMILLILAIATAVLAALRALLILQKATSPEIKQIVKELIRLIQKIVERAERATDEEEIKLMILLILAIATAVLAALLALEILMKATSPEIKQIVKELIRLIQKIVERAERATDEEEIKLMILLILAIALAVLAALLALEILMKATSPEIKQIVKELIRLIQKIVERAERATDEEEIREMISLIIELALKVLLDLFRLEHS

SEQ ID NO: 522 - protein, 241 aa, synthetic construct
  REGION 1..241: note = Synthetic
SRREILILELLVFSDAARAIIRFMGDEELFRQIKEIAQKAEESAKKALELGDEELIRMALLIVQLLYYSVSALSIILIMGDEELFRQIKEIAQKAIESATKALELGDEELIRMALLIVQLLWYSVSALLIILIMGDEELFRQIKEIAQKAIESATKALELGDRKLIQMALLIVRLLWYSVSALSIIKEMGDEELFRQIKEIAQKAIESATKALELGDLELIIRALQTVIRLFFHVKLLSES

SEQ ID NO: 523 - protein, 224 aa, synthetic construct
  REGION 1..224: note = Synthetic
DERRELALLVEFFAIQVKRLVKEAGDPQLLESAKRLIESAMEALKAGDEESLKMALLAARVLYFAVLVYLLVQEAGDPQLLESAKRLIESAMEALKAGDEESLKMALLAARVLYFAVLVYLLVQEAGDPQLLESAKRLIESAMEALKAGDEESLKMALLAARVLYFAVLVYLLVQEAGDPQLLESAKRLIESAMEALKAGDRRRLKRALVDAEILYEEVLEYLL

SEQ ID NO: 524 - protein, 241 aa, synthetic construct
  REGION 1..241: note = Synthetic
DRMEELIYHLRRFSYSARLIIERMGDEELFRQIKEIAQKAIESATKALELGDEELIRMALLIVQLLWYSVSALSIIKKMGDEELFRQIKEIAQKAIESATKALELGDEELIRMALLIVQLLWYSVSALSIIKRMGDEELFRQIKEIAQKAIESATKALELGDEELIRMALLIVQLLWFSVSALSIIKKMGDEELFRQIKEIAQKAIESATKALELGDEELIRRALFIVQRLFFHVKLLSEL

SEQ ID NO: 525 - protein, 241 aa, synthetic construct
  REGION 1..241: note = Synthetic
DRMERLIQELLEFSFRAQAHIEFMGDEELFRQIKEIAQKAIESARKALELGDEELIRMALLIVQLLYYSVSALAIIKHMGDEELFRQIKEIAQKAIESATKALELGDEELIRMALLIVQLLWYSVSALSIIKEMGDEELFRQIKEIAQKAIESATKALELGDEELIRMALLIVQLLWYSVSALSIIKKMGDEELFRQIKEIAQKAIESATKALELGDEELIRRALKIVIRLFYHVELLLRS

SEQ ID NO: 526 - protein, 240 aa, synthetic construct
  REGION 1..240: note = Synthetic
SEFEHIILEIYVIIFRARVIALEAGDPELRERIKKSAQKVLESALRALELGDMESLEFAWWIVQILLIMVLALLIAQEAGDPELFERIKKSAQKVLESALRALELGDMESLEFAWWIVQILLIMVLALLIAQEAGDPELFERIKKSAQKVLESALRALELGDMESLEFAWWIVQILLIMVLALLVAQEAGDPELFERIKKSAQKVLESALRALELGDMESLEFAFRIVKRLLLEVEYLLT

SEQ ID NO: 527 - protein, 233 aa, synthetic construct
  REGION 1..233: note = Synthetic
DFEELIDEIEVLVYIAEVLAKNLSPEIFEQVREIAQKILESAKKALQLGDMELLLFALLIVRILVYMVRALLIALRLSPEIFEQVREIAQKILESAKKALQLGDMELLLFALLIVRILLYMVQALLLARNLSPEIFEQVREIAQKILESAKKALQLGDMELLQFALHIVRILLAMVQALLLARNLSPEIFEQVREIAQKILESAKKALQLGDRELLLEALVLVLRLLATVQIL

SEQ ID NO: 528 - protein, 233 aa, synthetic construct
  REGION 1..233: note = Synthetic
DFEELITRIKVLVYIAEILAELLSPEIFEQVREIAQKILESAKKALQLGDMELLLFALLIVRILVYMVEALLIALRLSPEIFEQVREIAQKILESAKKALQLGDMELLLFALLIVRILLYMVQALLLARNLSPEIFEQVREIAQKILESAKKALQLGDMELLLFALLIVRILLYMVQALLLARNLSPEIFEQVREIAQKILESAKKALQLGDMELLRRALYLVIRLLLEVESS

SEQ ID NO: 529 - protein, 216 aa, synthetic construct
  REGION 1..216: note = Synthetic
SIEIAIRIVQLLLRIAEEARRQGDEELARKVLRIAYLVLAVSLLLEEYKKKGGTSEIFQIAVEIVLLLLRLALEASKQGDQELARKVVEIALFVAQVLLLLMRYKEKGGTSEIFQIAVEIVLLLLRLALEASKQGDQELARKVVEIALFVAQVLLLLMRYKEKGGTSELFQIAVEIVLLLLRLALEASKQGDQELARKVVEIALRVAQKLLSHLES

SEQ ID NO: 530 - protein, 216 aa, synthetic construct
  REGION 1..216: note = Synthetic
IEEIAREILRLLFELAEEALKQGDHELALLVLQIASLVVHVLTLLLRYKEKGGTSEIFQIAVEIVLLLLRLALEASKQGDQELARKVVEIALFVAQVLLLLMRYKEKGGTSEIFQIAVEIVLLLLRLALEASKQGDQELARKVVEIALFVAQVLLLLMRYKEKGGTSEIFQIAVEIVLLLLRLALEASKQGDQELARKVVERAVHVALQLLLLLNS

SEQ ID NO: 531 - protein, 232 aa, synthetic construct
  REGION 1..232: note = Synthetic
IEIEEQLIEELLKLLRKSLRADGEELEEILERLKIIELLIRLALLAVQALEMAKRADDPELIEILRQLVQEAVKLIQKSRRADGEELEEILERLKIISLLIRLALLAVQALEMAKRADDPELIEILRQLVQEAVKLIQKSRRADGEELEEILERLKIISLLIRLALLAVQALEMAKRADDPRLIELLRQLVQEAVKLIQKSRRADGEERQHILANLFRISFLIKTALRDVQS

SEQ ID NO: 532 - protein, 232 aa, synthetic construct
  REGION 1..232: note = Synthetic
IEIEHQLREEYSKLLQLSLRADGEELEEILERLKIISLLIRLALLAVQALEMAKRADDPELIEILRQLVQEAVKLIQKSRRADGEELEEILERLKIISLLIRLALLAVQALEMAKRADDPELIEILRQLVQEAVKLIQKSRRADGEELEEILERLKIISLLIRLALLAVQALEMAKRADDPELIELLRQLVQEAVKLIQKSRRADGEELEEILELLKRISKRIKAALLLVES

SEQ ID NO: 533 - protein, 246 aa, synthetic construct
  REGION 1..246: note = Synthetic
SEEARRLLLELSLKLTEILLRYHRTGDEKMRELFEQLRQLFEVAKQIVEAARLLVEAKKAGSPELIEAVQLLLELAQKLIEILQRYRETGDEKMRELFEQLRQLWEVAKQIVEAARLLVEAKKAGSPELIEAVQLLLELAQKLIEILQRYRETGDEKMRELFEQLRQLWEVAKQIVEAARLLVEAKKAGSPELIEAVQLLLELAQKLIEILQRYRETGDEKMRELFEQLRKEFERARLRVEEARLS

SEQ ID NO: 534 - protein, 224 aa, synthetic construct
  REGION 1..224: note = Synthetic
DELKHLAIEVLLLAIRVLILVKKAGDPQLRESAKRLEESAMEALKAGDEESLKMALLAARVLYFAVLVYLLVQEAGDPQLLESAKRLIESAMEALKAGDEESLKMALLAARVLYFAVLVYLLVQEAGDPQLLESAKRLIESAMEALKAGDEESLKMALLAARVLYIAVLVYLLVQEAGDPQLLESAKRLIESAMEALKAGDETRLLRALAQALELLNHVRHVLS

SEQ ID NO: 535 - protein, 246 aa, synthetic construct
  REGION 1..246: note = Synthetic
SEEAFELLIELLRKLLEILRRYKETGDEKMRELYEQLRQLFEVAQQIVEAAELLEEAKKAGSPELIEAVQLLLELAQKLIEILQRYRETGDEKMRELFEQLRQLWEVAKQIVEAARLLVEAKKAGSPELIEAVQLLLELAQKLIEILQRYRETGDEKMRELFEQLRQLWEVAKQIVEAARLLVEAKKAGSPELIEAVQLLLELAQKLIEILQRYRETGDEKMRELYYELLTRWLRAKEIVEAARRL

SEQ ID NO: 536 - protein, 246 aa, synthetic construct
  REGION 1..246: note = Synthetic
SEEAFRLLIELLQELVEILRRYLETGDEKNRELFEQLYQLVEVAYQIVEAAELLVEAKKAGSPELIEAVQLLLELAQKLIEILQRYRETGDEKMRELFEQLRQLWEVAKQIVEAARLLVEAKKAGSPELIEAVQLLLELAQKLIEILQRYRETGDEKMRELFEQLRQLWEVAKQIVEAARLLVEAKKAGSPELIEAVQLLLELAQKLIEILQRYRETGDEKFRRLFDHLHRLWEVAKRIVEEARLL

SEQ ID NO: 537 - protein, 265 aa, synthetic construct
  REGION 1..265: note = Synthetic
DELLRLALQIFAEALLLEDLAKKHGNPEVFRIAQEILQYLRELREELKRAQKEGDKEVLERLKLKLIALEIMALAAKLLVLAKQHGNPEVFRIAQEILQYLRELLEELKRAQKEGDKEVLERLKLKLIALEIMALAAELLVLAKQHGNPEVFRIAQEILQYLRELLEELKRAQKEGDKEVLERLKLKLLALEIMALAAELLVLAKQHGNPEVFRIAQEILQYLRELLEELKRAQKEGDKEVLERLRRKLTHLYILALRAHLLVRS

SEQ ID NO: 538 - protein, 254 aa, synthetic construct
  REGION 1..254: note = Synthetic
SEEENETEYLILQALAELLRALDLLKEAGDPESVEIVRQTLRELYELLQEYKETGDEELLEKLRTTVLIAIAIALLALAMLLLKQAGDPESVEIVRQTLRELYELLQEYKETGDEELLEKLRTTVLIAIAIALLALAMLLLKQAGDPESVEIVRQTLRELYELLQEYKETGDEELLEKLRTTVLIAIAIALLALAMLLLKQAGDPESVEIVRQTLRELYELLQEYKETGDEELLEKLRTTVRKAEQIALEARVS

SEQ ID NO: 539 - protein, 281 aa, synthetic construct
  REGION 1..281: note = Synthetic
SEIEQEQIEVRHLLLEVELIARTIFKRTGDPKAQETAQQAIEIAQKFLQMTEEYRRTGDERYRETARILKELLEVLHLLAEVVLLALEIFKKTGDPKAQETAQQAIEIAQKFLQMTEEYRRTGDERYRETARILKELLEVLHLLAEVVLLALEIFKKTGDPKAQETAQQAIEIAQKFLQMTEEYRRTGDERYRETARILKELLEVLHLLAEVVLLALEIFKKTGDPKAQETAQQAIEVAQKFLQMTEEYRRTGDERYRETARELFAQLLLLLHEAEQVLLS

SEQ ID NO: 540 - protein, 269 aa, synthetic construct
  REGION 1..269: note = Synthetic
SREEVEIHIIANEALLLLFRALRIALEMGDEELEETVRRLLELVFQILQKALGSTGEKLEEMKRLLEIVLLAVEAAVLLFKAFSIAQKMGDEELQETVRRLLELVFQILQKALGSTGEKLEEMKRLLEIVLLAVEAAVLLFKAFSIAQKMGDEELQETVRRLLELVFQILQKALGSTGEKLEEMKRLLEIVLLAVEAAVLLFKAFSIAQKMGDEELQETVRRLLELVFQILQKALGSTGEKLEEMKRLLERVLDEVKEAVHHFELFSRS

SEQ ID NO: 541 - protein, 269 aa, synthetic construct
  REGION 1..269: note = Synthetic
MKRLREIRQLAFKAEHLLHRAHFIAEQMGDEELQETVRRLLELVFQILQKALGSTGEKLEEMKRLLEIVLLAVEAAVLLFKAFSIAQKMGDEELQETVRRLLELVFQILQKALGSTGEKLEEMKRLLEIVLLAVEAAVLLFKAFSIAQKMGDEELQETVRRLLELVFQILQKALGSTGEKLEEMKRLLEIVLLAVEAAVLLFKAFSIAQKMGDEELQETVRRLLELVFQILQKALGSTGEKLEEMKRLLEIVLRKVRAEVLQFEVIEHS

SEQ ID NO: 542 - protein, 269 aa, synthetic construct
  REGION 1..269: note = Synthetic
DQELLEIKFIAIKAQLLLFEAHRIAQKMGDEELQETVRRLFELVFQILQKALGSTGEKLEEMKRLLEIVLLAVEAAVLLFKAFSIAQKMGDEELQETVRRLLELVFQILQKALGSTGEKLEEMKRLLEIVLLAVEAAVLLFKAFSIAQKMGDEELQETVRRLLELVFQILQKALGSTGEKLEEMKRLLEIVLLAVEAAVLLFKAFSIAQKMGDEELQETVRRLLELVFQILQKALGSTGEKLRHMLDLLFQVLHEVRSKVFRFETLSES

SEQ ID NO: 543 - protein, 269 aa, synthetic construct
  REGION 1..269: note = Synthetic
DREKDEIKYIALEAIYLLNHALEIAQKMGDEELQETVRRLLELVRQILQKALGSTGEKLEEMKRLLEIVLLAVEAAVLLFKAFSIAQKMGDEELQETVRRLLELVFQILQKALGSTGEKLEEMKRLLEIVLLAVEAAVLLFKAFSIAQKMGDEELQETVRRLLELVFQILQKALGSTGEKLEEMKRLLEIVLLAVEAAVLLFKAFSIAQKMGDEELQETVRRLLELVFQILQKALGSTGEKLHQMKLRLREVLLEVRFAVHHFENLELS

SEQ ID NO: 544 - protein, 303 aa, synthetic construct
  REGION 1..303: note = Synthetic
IEIERQILEARLIALRAESLAFQALINVEFILRKTGSEEAEELSRIVQEIIRLILEALKEFKRARDEETIEILLQIIRAILLAVQAILLAIQAFLIVIEIYEKTGSEEAEELSRIVQEIIRLILEALKEFKRARDEETIEILLQIIRAILLAVQAIYLAIQAFSIVIEIYEKTGSEEAEELSRIVQEIIRLILEALKEFKRARDEETIEILLQIIRAILLAVQAIYLAIQAFSIVIEIYEKTGSEEAEELSRIVQEIIRLILEALKEFKRARDEETIEILLRIIRHILHEVRKIFVHIERFSS

SEQ ID NO: 545 - protein, 224 aa, synthetic construct
  REGION 1..224: note = Synthetic
SKMEELALEVLKLALLVELLVTRAGDPQLLESAKRLIESAMEALKAGDEESLKMALLAARVLYFAVLVYLLVQEAGDPQLLESAKRLIESAMEALKAGDEESLKMALLAARVLYFAVLVYLLVQEAGDPQLLESAKRLIESAMEALKAGDEESLKMALLAARVLYFAVLVYLLVQEAGDPQLLESAKRLIESAMEALKAGDEHSLRRALQQAIELFIRVRYTLE

SEQ ID NO: 546 - protein, 285 aa, synthetic construct
  REGION 1..285: note = Synthetic
DHEFRRMRTQAHEAEILAEEAIKELKRQGDDELARLLLEAAQSLLELLRELKEVLQRGNEEEFQRLYKSILMFVLALIAIVQAALAITELKRQGDDELARLLLEAAQSLLELLRELKEVLQRGNEEEFQRLYKSILMFVLALIAIVQAALAITELKRQGDDELARLLLEAAQSLLELLRELKEVLQRGNEEEFQRLYKSILMFVLALIAIVQAALAITELKRQGDDELARLLLEAAQSLLELLRELKEVLQRGNEEEFKRLFNEIFRFVIRLRHIVEEAELNTRQ

SEQ ID NO: 547 - protein, 285 aa, synthetic construct
  REGION 1..285: note = Synthetic
DEKSNRMHTEARKAHIDAESAIRELKRQGDDELARLLLEAAQSLLELLRELKEVLQRGNEEEFQRLYKSILMFVLALIAIVQAARAITELKRQGDDELARLLLEAAQSLLELLRELKEVLQRGNEEEFQRLYKSILMFVLALIAIVQAALAITELKRQGDDELARLLLEAAQSLLELLRELKEVLQRGNEEEFQRLYKSILMFVLALIAIVQAALAITELKRQGDDELARLLLEAAQSLLELLRELKEVLQRGNEEEFQRLYRSIREFVLRLRELVLHARNETEL

SEQ ID NO: 548 - protein, 285 aa, synthetic construct
  REGION 1..285: note = Synthetic
LEKSEEMRRLAQHALSLAEAAIRILKERGDDELARLLLEAAQSLLELLRELKEVLQRGNEEEFQRLYKSILMFVLALIAIVQAANAITRLKDQGDDELARLLLEAAQSLLELLRELKEVLQRGNEEEFQRLYKSILMFVLALIAIVQAALAITELKRQGDDELARLLLEAAQSLLELLRELKEVLQRGNEEEFQRLYKSILMFVLALIAIVLAALAITELKRQGDDELARLLLEAAQSLLELLRELKEVLQRGNEEEFQRLYRKIEQLVFHLIELVVRARLITRS

SEQ ID NO: 549 - protein, 272 aa, synthetic construct
  REGION 1..272: note = Synthetic
SEREQEFSELAHEALIIVLLILTLADKAGDPELSEQAKKLFEELVKTFERYEKATDEEELERLYRLMQFLLLAVQALLIVALILLLAQQAGDPELSEQAKKLFEELVKTFERYRKATDEEELERLYRLMQFLLLAVQALLIVALILLLAQQAGDPELSEQAKKLFEELVKTFERYRKATDEEELERLYRLMQFLLLAVQALLIVALILLLAQQAGDPELSEQAKKLFEELVKTFERYRKATDEEELERLYRLMQFLLEEVRRLLLRAHELLL

SEQ ID NO: 550 - protein, 272 aa, synthetic construct
  REGION 1..272: note = Synthetic
DIEETRFKFLALEALLIVHEILRLAEQAGDPELSEQAKKLREELVKTFERYRKATDEEELERLYRLMQFLLLAVQALLIVALILLLAQQAGDPELSEQAKKLFEELVKTFERYRKATDEEELERLYRLMQFLLLAVQALLIVALILLLAQQAGDPELSEQAKKLFEELVKTFERYRKATDEEELERLYRLMQFLLLAVQALLIVALILLLAQQAGDPELSEQAKKLFEELVKTFERYRKATDEEELRRLEQLMQRLLYEVHLLLLRALELLL

SEQ ID NO: 551 - protein, 272 aa, synthetic construct
  REGION 1..272: note = Synthetic
SEEETEFRLLATQARTNVLLIELLAQLAGDPELSEQAKKLFEELVKTFERYRKATDEEELERLYRLMQFLLLAVQALYIVARILLLAQKAGDPELSEQAKKLFEELVKTFERYRKATDEEELRRLYELMQFLLLAVQALLIVALILLLAQQAGDPELSEQAKKLFEELVKTFERYRKATDEEELRRLYKLMQFLLLAVQALLIVALILLLAQQAGDPELSEQAKKLFEELVKTFERYRKATDEEELKRLERLMFELLVEVEELLEVALELLS

SEQ ID NO: 552 - protein, 272 aa, synthetic construct
  REGION 1..272: note = Synthetic
SKEHSEFLYLAARALYIVSRILRLAEQAGDPELSEQAEKLFEELRKTIERYLKATDEEELERLYRLMQFLLLAVQALLIVALILLLAQQAGDPELSEQAKKLFEELVKTFERYRKATDEEELERLYRLMQFLLLAVQALLIVALILLLAQQAGDPELSEQAKKLFEELVKTFERYRKATDEEELERLYRLMQFLLLAVQALLIVALILLLAQQAGDPELSEQAKKLFEELVKTFERYRKATDEEELERLYRLMERLLLEVRLLLFRAEILLH

SEQ ID NO: 553 - protein, 272 aa, synthetic construct
  REGION 1..272: note = Synthetic
DIERNQFRILADQARLIVELIERLAQQAGDPELSEQAKKLFEELVKTFERYRKATDEEELERLYRLMQFLLLAVQALLIVALILLLAQQAGDPELSEQAKKLFEELVKTFERYRKATDREELERLYRLMQFLLLAVQALLIVALILLLAQQAGDPELSEQAKKLFEELVKTFERYRKATDEEELERLYELMQFLLLAVQALLIVALILLLAQQAGDPELSEQAKKLFEELVKTFERYRKATDEEELKRLYLHMLELLKAVQKLLRVALELLS

SEQ ID NO: 554 - protein, 296 aa, synthetic construct
  REGION 1..296: note = Synthetic
VELEQLERLVEEAKLQILYIILEAERHLERTGDEKARRISEIAQKMIELLQEALETFQRASGEEQEKAVELIQLVFLVVVAVIQILKIISEALEELERTGDEKARRISEIAQKMIELLQEALETFQRASGEEQEKAVELIQLVFLVVVAVIQILKIISEALRELERTGDEKARRISEIAQKMIELLQEALETFQRASGEEQEKAVELIQLVFLVVVAVIQILKIISEALRELERTGDEKARRISEIAQKMIELLQEALETFQRASGEEQEKARELIVKVYLHVIEVIIRLEHLSKL

SEQ ID NO: 555 - protein, 281 aa, synthetic construct
  REGION 1..281: note = Synthetic
DRLDELLQKLQELLVRLRLLVERLRRSDDPTLRELAQELIESVRELLEQLKKAKKTMSEEQIEQWLRELLLQALLMQLLALLALLVEELRRSDDPTLRELAQELIESVRELLEQLKKAKKTMSEEQIEQWLRELLLQALLMQLLALLALLVEELRRSDDPTLRELAQELIESVRELLEQLKKAKKTMSEEQIEQWLRELLLQALLMQLLALLALLVEELRRSDDPHLRENAQELIESVRELLEQLKKAKKTMSEEQIRKWLLRLLEIALVLLNLARLALES

SEQ ID NO: 556 - protein, 232 aa, synthetic construct
  REGION 1..232: note = Synthetic
DDHKETVLLQALVIILRIAKQGDYEKATEEAQRVVKRILEQAGLSEEESRQTLLEILKELITFLAQIIIEQIAKQGDYEKATEEAQRMVKRILEQAGLSEEESRQTLLEILKELITFLAQIIIEQIAKQGDYEKATEEAQRMVKRILEQAGLSEEESRRTLLEILKELITFLAQIIIEQIAKQGDYEKATEEAQRMVKRILEQAGLSEEESRRTLRLIRLQLEIFLLEIKES

SEQ ID NO: 557 - protein, 281 aa, synthetic construct
  REGION 1..281: note = Synthetic
DRIEELIVELYRLLVLLELLVEKLRRSDDPTLRELAQELIESVRELLEQLKKARKTMSEEQIEQWLRELLLQALLMVLLAILALLVEELRRSDDPTLRELAQELIESVRELLEQLKKAKKTMSEEQIEQWLRELLLQALLMQLLALLALLVEELRRSDDPTLRELAQELIESVRELLEQLKKAKKTMSEEQIEQWLRELLLQALLMQLLALLALLVEELRRSDDPKLRELAQELIESVRELLEQLKKAKKTMSEEQIREWLLRLLLHAEHMQREALHALLV

SEQ ID NO: 558 - protein, 257 aa, synthetic construct
  REGION 1..257: note = Synthetic
SQEEKLEELAIRIRLLVELVKHLVRLAGNPELFEKFREILELILQLIKKVLKAGKDEEAEQIARLALLAALILELVIEVYRLVREAGNPELFEKFREILELILQLIKKVLKAGKDEEAEQIARLALLAALILSLVIEVYLLVRQAGNPELFEKFREILELILQLIKKVLKAGKDEEAEFIARLALLAALILSLVIEVYLLVRQAGNPELFEKFREILELILQLIKKVLKAGKDQRAHEIALRALSLALELVTQIRIL

SEQ ID NO: 559 - protein, 245 aa, synthetic construct
  REGION 1..245: note = Synthetic
SELERELSKEVKRQVHLVLELLERGDQEEAEEHSKIAQLLLQLILLIHQVREILEQAKKTVSPEILELLKELSREVFEQARRVLELLKRGDIEEAQEHLQIALELARLIIYILRVMQILEQAKKTVSPEILELLKELSREVFEQARRVLELLKRGDIEEAQEHLQIALELARLIIYILRVMQILEQAKKTVSPEILEELKELSRQVFENARRVLELLKRGDIREARLFLRIALLIAERIILILEL

SEQ ID NO: 560 - protein, 246 aa, synthetic construct
  REGION 1..246: note = Synthetic
SELHRHHLIALEIRHLAESLGDPEAIELARELLKEIVRLIQEFQETGSEEAREQLREVFELIQMLSSAIKITHLARELGDPEAIELARELLKEIVRLIQEFQETGSEEAREQLREVFELIEMLSSAIKITLLARKLGDPEAIELARELLKEIVRLIQEFQETGSEEARRQLLEVYFLIEMLSSAIKITLLARKLGDPEAIELARELLKEIVRLIQEFQETGSEEAREQLLEVFVRIRELEFEIRFS

SEQ ID NO: 561 - protein, 226 aa, synthetic construct
  REGION 1..226: note = Synthetic
ELEEQLERLIEELHRLVRNLKGKSEEERRQLQLLIHLLILALYVFLLAAQAIEAGVDEEMSEQLKRLLREVEELLQALKGKSEEEFKQLSELIKLLLLAIIVFVLAALAIRAGVDEEMSEQLKRLLREVEELLQALKGKSEEEFKQLSLLIKLLLEAIIVFVLAALAIRAGVDEEMSEQLKRLLREVEELLQALKGKSEEEFRRLSERIIELLNRIRLTVQRARTS

SEQ ID NO: 562 - protein, 221 aa, synthetic construct
  REGION 1..221: note = Synthetic
AETERELLRLLTELFHLILQATSEEEKKFLRLLAEIMLLILRAVEYAAEALERGSANAETLRELIRQLKKLLEQIQQATSEEEFKFLFLLAQIMVLILIAVVYAAEALERGSANAETLRELIRQLKKLLEQIQQATSEEEFKFLFLLAQIMVLILIAVVYAAEALERGSANAETLRELIRQLKKLLEQIQQATSEEEFHRLFLKAYHLVLHLRVVVHHAES

SEQ ID NO: 563 - protein, 265 aa, synthetic construct
  REGION 1..265: note = Synthetic
DEQREVKYHYARAVELVLQVHKYARKLGDPHLRQLVEQLEEELERIFETWRSGDEEKQKRAFEQLQVIIEFAKAALLVVLVSEYAKKLGDPHLRQLVEQLIEELLRIFETWRSGDEEKQKRAFEQLQVIIEFAKAALLVVLVSEYAKKLGDPHLRQLVEQLIEELLRIFETWRSGDEEKQKRAFEQLQVIIEFAKAALLVVLVSEYAKKLGDPHLRQLVEQLIEELLRIFETWRSGDEEKQKRAFEQLQEIIRLAEVALSIVRYS

SEQ ID NO: 564 - protein, 265 aa, synthetic construct
  REGION 1..265: note = Synthetic
DEEREVHREFVEAQVLVLLVESIAFELGDPHLRQLVEQLIEELLRIFETWRSGDEEKQKRAFEQLQVIIEFAKAALLVVLVSEYAKKLGDPHLRQLVEQLIEELLRIFETWRSGDEEKQKRAFEQLQVIIEFAKAALLVVLVSEYAKKLGDPHLRQLVEQLIEELLRIFETWRSGDEEKQKRAFEQLQVIIEFAKAALLVVLVSEYAKKLGDPHLRQLVEQLIEELLRIFETWRSGDEEKQKRAFEQLQQIIFNARRALLEVQES

SEQ ID NO: 565 - protein, 241 aa, synthetic construct
  REGION 1..241: note = Synthetic
DEEEQLKTEIISLLLELRRLAKKARRAGVDAEKVREILEQAREILEQALKVTGEELRQLLTMIKIILLLLQLFLLAVKARRAGVDAEKVREILEQAREILEQALKVTGEELRQLLTMIKIILLLLQLFLLAVKARRAGVDAEKVREILEQAREILEQALKVTGEELRQLLTMIKIILLLLQLFLLAVKARRAGVDAEKVREILEKAREVLEQALKVTGEELEHLLLLIKYIIIELEALIHQ

SEQ ID NO: 566 - protein, 257 aa, synthetic construct
  REGION 1..257: note = Synthetic
DERERLAVRIIHLVLEARELVKRAERAGVDVEKIRQILEEILRIQEQAKEFLQRGDEESLKRALLAVKIILLVLEAFLLMARAERAGVDVEKIRQILEEILRIQEQAKEFLQRGDEESLKRALLAVKIILLVLEAFLLMARAERAGVDVEKIRQILEEILRIQEQAKEFLQRGDEESLKRALLAVKIILLVLEAFLLMARAERAGVDVEKIRQILEEILRIQEQAKEFLQRGDEHLLEFALLQVEVLLFLLRLFLRS

SEQ ID NO: 567 - protein, 224 aa, synthetic construct
  REGION 1..224: note = Synthetic
SELERQELRIRSLLLEAQALAIEMGDPEQQKLAEEVMKRFIQAVREGDQEKLELILQALIIILLLLKAIKLAQEMGDPEQQKLAEEVMKRFIQAVREGDQEKLELILQALIIILLLLKAIKLAQEMGDPEQQKLAEEVMKRFIQAVREGDQEKLELILQALIIILLLLKAIKLAQEMGDPEQQKLAEEVMKRFIQAVREGDQKKLIEILSELETILRHLELIKS

SEQ ID NO: 568 - protein, 255 aa, synthetic construct
  REGION 1..255: note = Synthetic
MEEEARHLVNNVRYFYYEIHLILEQAGVPEEVKETIQRILEIALEALRLLKETGDPKALMIVKAAFLVIQVVYFYAQILLLLKEAGVPEEVKETIQRILEIALEALRLLKETGDPKALMIVKAAFLVIQVVYFYAQILLLLKEAGVPEEVKETIQRILEIALEALRLLKETGDPKALMIVKAAFLVIQVVYFYAQILLLLKEAGVPEEVKETIQRILEIALEALRLLKETGDPKALMIVRHAFLLILLVFILAEL

SEQ ID NO: 569 - protein, 223 aa, synthetic construct
  REGION 1..223: note = Synthetic
DLELNEIVLKAEVYAILLKEAGFDEEIIRTVLEILKEALEIMKQGNYEEAFWLVQLALIVAQAAHYAVLLKRAGFDEEIIRTVLEILKEALEIMKQGNYEEAFWLVQLALIVAQAALYAVKLKQAGFDEEIIRTVLEILKEALEIMKQGNYEEAFWLVHLALIVAQAALYAVKLKQAGFDEEIIRTVLEILKEALEIMKQGNYEEAHRLVLHALHLASEALLS

SEQ ID NO: 570 - protein, 223 aa, synthetic construct
  REGION 1..223: note = Synthetic
DSELERIVFEAELLARDLKEAGFDEEIIRTVLEILKEALEIMKQGNYEEAFWLVQLALIVAQAAEYAVKLKQAGFDEEIIRTVLEILKEALEIMKQGNYEEAFWLVQLALIVAQAALYAVKLKQAGFDEEIIRTVLEILKEALEIMKQGNYREAHFLVYLALIVAQAALYAVKLKQAGFDEEIIRTVLEILKEALEIMKQGNYREALELVHKALVIAKRALFE

SEQ ID NO: 571 - protein, 254 aa, synthetic construct
  REGION 1..254: note = Synthetic
TEEEVELIIIAYIALLLLEFVLRFTGDPKAKEMVEQLLELIQEAEESREQGDLERFRQLLRELTLFAIAYIALAHLLLVYFLTGDPKAKEMVEQLLELIQEAEESLEQGDLERFRQLLRELTLFAIAYIALARLLLVYRKTGDPKAKEMVEQLLELIQEAEESLEQGDLERFRQLLRELTLFAFAYIALAILLLVYRKTGDPKAKELVEQLLELIQEAEESLEQGDLERFRQLLRELDRNALKYIYTARHLLVS

SEQ ID NO: 572 - protein, 252 aa, synthetic construct
  REGION 1..252: note = Synthetic
SKLRLHLEHLLEQARLLFERARDKGDPEALEQALQIVQFVIKLLVETAKRLKELGDLEQLFRLLLAILEAAQSLFEMAREAGDPEALEQALQIVQFVIKLLVETAKRLKELGDLEQLFRLLLAILEAAQSLFEMAREAGDPEALEQALQIVQFVIKLLVETAKRLKELGDLEQLFRLLLAILEAAQSLFEMAREAGDPEALEQALQIVQFVIKLLVETAKRLKELGDTEQLLELREAITRARLLLEYMATHA

SEQ ID NO: 573 - protein, 278 aa, synthetic construct
  REGION 1..278: note = Synthetic
DEKENEILILFFRAKLLAETILRRVKKSGDPELKELIQRALETLRQARELSERAQQAGGEQLEEFLKIMLILIWWVLALLTAIRILLEVKKSGDPELKELIQRALETLRQARELSERAQQAGGEQLEEFLKIMLILIWWVLALLTAIRILLEVKKSGDPELKELIQRALETLRQARELSERAQQAGGEQLEEFLKIMLILIWWVLALLTAIRILLEVKKSGDPRLKELIQRALETLRQARELSERAQQAGGEQLEEFLRIMEELIRKVENLLNFIREL

SEQ ID NO: 574 - protein, 276 aa, synthetic construct
  REGION 1..276: note = Synthetic
SEEEKRALEAELLILRALLLAHELFELAEKLGDPELLRTIKEMIEFALTQIELVRRATDKEELKELIEALTAVAFIIIAIVLALQLFIQAKQLGDPELLRTIKEMIEFALTQIELVRRATDKEELKELIEALTAVAFIIIAIVLALQLFIQAKQLGDPELLRTIKEMIEFALTQIELVRRATDKEELKELIEALTAVAFIIIAIVLALQLFIQAKQLGDPELLRTIKEMIEEALTQIELVRRATDKEELKELIEQLTHVAEYIRLVVRVLELEIES

SEQ ID NO: 575 - protein, 191 aa, synthetic construct
  REGION 1..191: note = Synthetic
DEEMRQVLLLAERVFKLAQKTGDPELIRAAKELLKKIAEIVLLFQNGIDAEEILERLRQLSFMAQVLYLALLVFELAQKTGDPELIRAAKELLKKIAEIVLLFQNGIDAERIRELLYDLYTMALVLYLALLVFELAQKTGDPELIRAAKELLKKIAEIVLLFQNGIDAEEIRKRLLELLLLALELLLRLLS

SEQ ID NO: 576 - protein, 195 aa, synthetic construct
  REGION 1..195: note = Synthetic
DEAEILLYERLSEILRLYRNGIDAEEILERLRQLKEMLHVLELALLVFELAQKTGDPELIRAAKELLKKIAEIVLLFQNGIDAEEILERLRQLSEMAQVLYIALLVFELAQKTGDPELIRAAKELLKKIAEIVLLFQNGIDAEEILERLRRLNQLARLLYNALRFFEVAQEHGDPRLIKLAKELLRVLAEIVLES

SEQ ID NO: 577 - protein, 211 aa, synthetic construct
  REGION 1..211: note = Synthetic
LKERRELELLLQEAHLIALLVEVIAQRSGDPLILEVAQELLKSVTEMLKELKKAKSEEEIRELKERVELVLLLAKAALLAALVALIAQQSGDPLILEVAQELLKSVTEMLKELKKAKSEEEIRELKERVELVLLLAKAALYAALVALIAQQSGDPLILEVAQELLKSVTEMLKELKKAKSEEEIRELEERVREVLIRAVQALSHALRILHS

SEQ ID NO: 578 - protein, 250 aa, synthetic construct
  REGION 1..250: note = Synthetic
SEVELALLYASIVENIAQVITELFGDKEKAKELQEAALEIIRHALEIRQRGDEESARIVMYVASALFYAALVLFIAVLITYQFGDKEKAKELQEAALEIIRHALEIVQRGDLESARIVMYVASALLYAALVLLIAIQITEQFGDKEKAKELQEAALEIIRHALEIVQRGDHRSAVIVLLVASALLYAAKVLYIALHITEKFGDKEKAKELQEAALEIIRHALEIVQRGDEESAHKVLSLAIRLLLAALKL

SEQ ID NO: 579 - protein, 249 aa, synthetic construct
  REGION 1..249: note = Synthetic
DLAEEAEELVREASQTAHYLFLLTGDERAQQTLEQAQRLLQRVYELLEAGDEEKLKLLILALEAMILVLEASKLAVELYELTGDERAQQTFEQAQRLLQRVYELLEAGDEEKLKLLILALEAMILVLEASKLAQELYRKTGDERAQQTFEQAQRLLQRVYELLEAGDEEKLRLLILALRAMILVLEASKLAQELYEKTGDERAQQTFEQAQRLLQRVYELLEAGDRQKLIELLRELKRLIVELQFLKLS

SEQ ID NO: 580 - protein, 211 aa, synthetic construct
  REGION 1..211: note = Synthetic
DSERQELELLLRLAKVTAELVALIARRSGDPLILEVAQELLKSVTEMLKELKKAKSEEEIRELKERVELVLLLALAALLAALVALIAQQSGDPLILEVAQELLKSVTEMLKELKKAKSEEEIKELRKRVRLVLLLAKAALLAALVALIAQQSGDPLILEVAQELLKSVTEMLKELKKAKSEEEIKELYRRVLEVLTRAYEALFEAEEALEA

SEQ ID NO: 581 - protein, 278 aa, synthetic construct
  REGION 1..278: note = Synthetic
SDEIERLLLKLLVLIHEIELLLRLLRRRGVDVEKIEEITKLAIETALQVLQTVKRGMDEEEIETLIRIAFLLLLLVLLMLEILFLLFQLRQAGVDVEKIEEITKLAIETALQVLQTVKRGMDEEEIETLIRIAFLLLLLVLLMLRILKLLFELRQAGVDVEKIEEITKLAIETALQVLQTVKRGMDEKEIEILIQIAFLLLLLVLLMLRILKLLFELRQAGVDVEEIEESTKLAIETALQVLQTVKRGMDLEEILKLIIRAYTELLYVLLLLEILKQS

SEQ ID NO: 582 - protein, 278 aa, synthetic construct
  REGION 1..278: note = Synthetic
SEEILHLLNQLLSLLHEIRLYLETLRRRGVDVEKIEEITKLAIETALQVLQTVKRGMDEEEIETLIRIAFLLLLLVLLMLEILFLLYLLRELGVDVEKIEEITKLAIETALQVLQTVKRGMDEEEIELLIRIAFLLLLLVLLMLRILKLLFELRQAGVDVEKIEEITKLAIETALQVLQTVKRGMDFLKILELILIAFLLLLLVLLMLRILKLLFELRQAGVDVEKIEERTKLAIETALQVLQTVKRGMDSEEILRLILHAYSLLVLVLFLLEYLLLS

SEQ ID NO: 583 - protein, 272 aa, synthetic construct
  REGION 1..272: note = Synthetic
SRTEHLFERIRIIAAKATEILQLVERKATSPEFRELVEEIREQIKRSLEEARQAHKEGDDEKLRTIYLFMLILLIAAKAILLLALVQQKATSPEFRELVEEILEQIKRSLEEARQAHKEGDDEKLRTIYLFMLILLIAAKAILLLALVQQKATSPEFRELVEEILEQIKRSLEEARQAHKEGDDEKLRTIYLFMLILLIAAKAILLLALVQQKATSPEFRELVEEILEQIKRSLEEARQAHKEGDDEKLRRIYRFMEHLLTEAHLILLRAEL

SEQ ID NO: 584 - protein, 272 aa, synthetic construct
  REGION 1..272: note = Synthetic
DDLEALLFLIKALAFEARAFLTLVRTKATSPEFRELVEEILEQIKRSVEEARQAHKEGDDEKLRTIFLFMLILLIAAKAIYLLALVQQKATSPEFRELVEEILEQIKRSLEEARQAHKEGDDEKLRTIYLFMLILLIAAKAILLLALVQQKATSPEFRELVEEILEQIKRSLEEARQAHKEGDDEKLRTIYLFMLILLIAAKAILLLALVQQKATSPEFRELVEEILEQIKRSLEEARQAHKEGDTEKLLKIFVFMLKLLRAAKAILLLALV

SEQ ID NO: 585 - protein, 272 aa, synthetic construct
  REGION 1..272: note = Synthetic
LRTEELFRRIERIAHRAHLLLLEVEEKATSPEFRELVEEILEQIKRSLEEARQAHKEGDDEKLRTIYLFMLILLIAAKAILLLALVQQKATSPEFRELVEEILEQIKRSLEEARQAHKEGDDEKLRTIYLFMLILLIAAKAILLLALVQQKATSPEFRELVEEILEQIKRSLEEARQAHKEGDDEKLRTIYLFMLILLIAAKAILLLALVQQKATSPEFRELVEEILEQIKRSLEEARQAHKEGDDEKLRTIYRFMEHLLEQARYILFQAES

SEQ ID NO: 586 - protein, 272 aa, synthetic construct
  REGION 1..272: note = Synthetic
DRTEKLYLEIVYIAAEALRLLELVQQKATSPEFRELVEEIEEQIRRSLEEAEQAHKEGDDEKLRTIYLFMLILLIAAKAILLLALVQQKATSPEFRELVEEILEQIKRSLEEARQAHKEGDDEKLRTIYLFMLILLIAAKAILLLALVQQKATSPEFRELVEEILEQIKRSLEEARQAHKEGDDEKLRTIYLFMLILLIAAKAILLLALVQQKATSPEFRELVEEILEQIKRSLEEARQAHKEGDDEKLRTIYRFMHQLLLRAELILQEAEN

SEQ ID NO: 587 - protein, 272 aa, synthetic construct
  REGION 1..272: note = Synthetic
SETEELFHRIRSIAYQALAILIEVRLKATSPEFRELVEEILEQIKRSLEEARQAHKEGDDEKLRTIYLFMLILLIAAKAILLLALVQQKATSPEFRELVEEILEQIKRSLEEARQAHKEGDDEKLRTIYLFMLILLIAAKAILLLALVQQKATSPEFRELVEEILEQIKRSLEEARQAHKEGDDEKLRTIYLFMLILLIAAKAILLLALVQQKATSPEFRELVEEILEQIKRSLEEARQAHKEGDDEKLREIFFFMLRLLLLAEEILHRAES

SEQ ID NO: 588 - protein, 272 aa, synthetic construct
  REGION 1..272: note = Synthetic
DDTEYLFNNILHIAYQARKLLALVQQKATSPEFRELVEEILEQIKRSLEEARQAHKEGDDEKLRTIYLFMLILLIAAKAILLLALVQQKATSPEFRELVEEILEQIKRSLEEARQAHKEGDDEKLRTIYLFMLILLIAAKAILLLALVQQKATSPEFRELVEEILEQIKRSLEEARQAHKEGDDEKLRTIYLFMLILLIAAKAILLLALVQQKATSPEFRELVEEILEQIKRSLEEARQAHKEGDKHKLLRIFVFMLELLLIAERILEEALV

SEQ ID NO: 589 - protein, 245 aa, synthetic construct
  REGION 1..245: note = Synthetic
DKEIEIERIFAEVKYIFHRIIRIAQKAGLDAEKVKEEMERAIQELRRLYESGSDEALKQVKILLIFAQVILIFIQIILIAQKAGLDAEKVKEEMERAIQELRRLYESGSDEALKQVKILLIFAQVILIFIQIILIAQKAGLDAEKVKEEMERAIQELRRLYESGSDEALKQVKILLIFAQVILIFIQIILIAQKAGLDAEKVKEEMERAIQELRRLYESGSDEALKEVKKTLIEAKQILLHIRRL

SEQ ID NO: 590 - protein, 250 aa, synthetic construct
  REGION 1..250: note = Synthetic
DYVEEAESLAYLVRIIAESITEKFGDKEKAKELQEAALEIIRHALEIRQRGDLESARIVMYVASALLYAAHVLKIALEITEKFGDKEKAKELQEAALEIIRHALEIVQRGDLESARIVMYVASALLYAAKVLLIALQITEKFGDKEKAKELQEAALEIIRHALEIVQRGDRRSAIIVMLVASALLFAAKVLLIALQITEKFGDKEKAKELQEAALEIIRHALEIVQRGDLEAALRVLAEAFLLLYEAEEL

SEQ ID NO: 591 - protein, 238 aa, synthetic construct
  REGION 1..238: note = Synthetic
SRLETQILIILLLVYEISQTLTDPESQERIRQSFEEIKRLLEEAKRAGDKERIKEVYLLAQIFLILALVMLISQTLTDPESQERIRQSFEEIKRLLEEAKRAGDKERIKEVYLLAQIFLILALVMLISQTLTDPESQERIRQSFEEIKRLLEEAKRAGDKERIKEVYLLAQIFLILALVMLISQTLTDPESQERIRQSFEEIKRLLEEAKRAGDEHRILQVLVEAIYILLQAELMLHR

SEQ ID NO: 592 - protein, 238 aa, synthetic construct
  REGION 1..238: note = Synthetic
DELLFEIERILLLVRRISQTLTDPESQERIRQSFEEIKRLLEEAKRAGDKERIKEVYLLAQIFLILALVMLISQTLTDPESQERIRQSFEEIKRLLEEAKRAGDKERIKEVYLLAQIFLILALVMLISQTLTDPESQERIRQSFEEIKRLLEEAKRAGDKERIKEVYLLAQIFLILALVMLISQTLTDPESQERIRQSFEEIKRLLEEAKRAGDKHLIHRVLLQARQILLHAEHILFS

SEQ ID NO: 593 - protein, 238 aa, synthetic construct
  REGION 1..238: note = Synthetic
DELLNRIRLILFAVELISQTLTDPESQERIRQSFEEIKRLLEEAKRAGDKERIKEVYLLAQIFLILALVMLISQTLTDPESQERIRQSFEEIKRLLEEAKRAGDERRIKEVYLLAQIFLILALVMLISQTLTDPESQERIRQSFEEIKRLLEEAKRAGDERRIREVYLLAQIFLILALVMLISQTLTDPESQERIRQSFEEIKRLLEEAKRAGDQRRIVEVLDQAREFLRLALEMLKS

SEQ ID NO: 594 - protein, 280 aa, synthetic construct
  REGION 1..280: note = Synthetic
DILEELRRLIAEIRALIDLARLLFRLGDLEYVKQTLQRALESAREVLESAQEMLQRAKEMGDLEKILEALEVLILVILALILLAELLLKFGDLEKVKQTLQRALESAREVLESAQEMLQRAKEMGDLEKILEALEVLILVILALILLAELLLKFGDLEKVKQTLQRALESAREVLESAQEMLQRAKEMGDLEKILEALEVLILVILALILLAELLLKFGDLEKVKQTLQRALESAREVYESAREMLQRAIKMGDLEKRREAERVLQLVALALNNLESLLS

SEQ ID NO: 595 - protein, 280 aa, synthetic construct
  REGION 1..280: note = Synthetic
DILEALRRIIQQILHLILLAELLLKFGDLEKVKETLQRALESAREVLESAQEMLQRAKEMGDLEKILEALEVLILVILALILLAELLLKFGDLEKVKQTLQRALESAREVLESAQEMLQRAKEMGDLEKILEALEVLILVILALILLAELLLKFGDLEKVKQTLQRALESAREVLESAQEMLQRAKEMGDLEKILEALEVLILVIEALILLAELLLKFGDLEKVKQTLQRALESAREVLESAQEMYQRARELGDEKKIEKALRVLVLVLLALVQLEKLLL

SEQ ID NO: 596 - protein, 246 aa, synthetic construct
  REGION 1..246: note = Synthetic
SEIEELKHLLQIAEQLATLAEIRGDEHIWRLASELARELTESIKEMLRRAQQQGDEKQIIEVLELLLLVAQILATLAEITGDEEIWKLASEVARELTESIKEMLRRAQQQGDEKQIIEVLELLLLVAQILATLAEITGDEEIWKLASEVARELTESIKEMLRRAQQQGDEKQIIEVLELLLLVAQILATLAEITGDEEIWKLASEVARELTESIKEMIRRARQQGDLRQQEEVLKLIQLVRRILAT

SEQ ID NO: 597 - protein, 246 aa, synthetic construct
  REGION 1..246: note = Synthetic
QIIRQLRIELQIAQSLADIAEEYGDEEIWKRASEVARELTESIKEMLRRAQQQGDEKQIIEVLELLLLVAQILATLAEITGDEEIWKLASEVARELTESIKEMLRRAQQQGDEKQIIEVLELLLLVAQILATLAEITGDEEIWKLASEVARELTESIKEMLRRAQQQGDEKQIIEVLELLLLVAQILATLAEITGDEEIWKLASEVARELTESIKEMIRRARQQGDLELLQEVLRLLILVLRILQS

SEQ ID NO: 598 - protein, 246 aa, synthetic construct
  REGION 1..246: note = Synthetic
SKIEYLKTLLFVAQILAELAEKHGDEEIYRFASEIARELTELIKEMLRRAQQQGDEKQIIEVLELLLLVAQILATLAEITGDEEIWKLASEVARELTESIKEMLRRAQQQGDEKQIIEVLELLLLVAQILATLAEITGDEEIWKLASEVARELTESIKEMLRRAQQQGDEKQIIEVLELLLLVAQILATLAEITGDEEIWKLASEVARELTESIKEMLRRAQQQGDQQLRKEVLELLLLVAQILAT

SEQ ID NO: 599 - protein, 288 aa, synthetic construct
  REGION 1..288: note = Synthetic
DEVERILLEMLLLALEAKHFARLAKRLADSPESQQKVEELLQRIKELIERAIKTLETKGIEEAYRTALVILILVRMLLLAVQAIYFALLAKRLADSPESQQKVEELLQRIKELIERAIKTLETKGIEEAYRTALVILILVRMLLLAVQAIYFALLAKRLADSPESQQKVEELLQRIKELIERAIKTLETKGIEEAYRTALVILILVRMLLLAVQAIYFALLAKRLADSPESQQKVEELLQRIKELIERAIKTLETKGIEEAYEYARVILYLVRYLLTLVEHIYRKLLS

SEQ ID NO: 600 - protein, 288 aa, synthetic construct
  REGION 1..288: note = Synthetic
DLVEHILTEMEILFVEARSFALRAKRLADSPESQQKVEELLQRIKELIERAIKTLETKGIEEAYRTALVILILVRMLLLAVQAIYFALLAKRLADSPESQQKVEELLQRIKELIERAIKTLETKGIEEAYRTALVILILVRMLLLAVQAIYFALLAKRLADSPESQQKVEELLQRIKELIERAIKTLETKGIEEAYRTALVILILVRMLLLAVQAIYFALLAKRLADSPESQQKVEELLQLIKEIIERAIKTLETKGIEEAYRTAHRVLIEVESLLHQVRVIFLQLLS

SEQ ID NO: 601 - protein, 222 aa, synthetic construct
  REGION 1..222: note = Synthetic
DRVESLITEAKAIVIEVRILAREAGDPEFQEFAKEILRTLLEIMQMGDLEKAKIVLLIARAALLVVLVYILAKQAGDPEFQEFAKEILRTLLEIMQMGDLEKAKIVLLIARAALLVVLVYILAKQAGDPEFQEFAKEILRTLLEIMQMGDLEKAKIVLLIARAALLVVLVYILAKQAGDPEFQEFAKEILRTLLEIMQMGDLRKARKVLRLAEEALLVVEEY

SEQ ID NO: 602 - protein, 250 aa, synthetic construct
  REGION 1..250: note = Synthetic
DETLKHVLQLAALVYANLHFIALHVPEEVAQKMRELAEEVLERAQQAAERGDEEELRRLSTLLTVILLALEVFILLTDIARQVPEEVAQKMKELAEEVVERAKQAAASGDEEELRRLSTLLTVILLALQVFLLLTEIAQQVPEEVAQKMKELAEEVVERAKQAAASGDEEELRRLSTLLTVILLALQVFLLLTEIAQQVPEEVAQKMKELAEEVVERAKQAAASGDEEELRRLEELLRQILLQLELILES

SEQ ID NO: 603 - protein, 241 aa, synthetic construct
  REGION 1..241: note = Synthetic
DEQKRELEILIFRARVLLELALEHADTPELREVIEELIKSLKQLMEEFRRTGDQKIFQIAVLLVLIAIAIVLLIEALKKADTPELREVIEELIKSLKQLMEEFRRTGDQKIFQIAVLLVLIAIAIVLLIQALKKADTPELREVIEELIKSLKQLMEEFRRTGDQKIFRIAELLVLIAIAIVLLIQALKKADTPELREVIEELIKSLKQLMEEFRRTGDEKIYREAVLLVYYAIQVVLEIQS

SEQ ID NO: 604 - protein, 281 aa, synthetic construct
  REGION 1..281: note = Synthetic
DELEDEANRALLLLHEAIILAEILLKRTGDEQAQRLIESLQKMIELLLELIQRIKETGDPRLVEILKLIVEAAEAIVSLIRALILAVHLLKRTGDEQAQRLIESLQKMIELLLELIQRIKETGDPRLVEILKLIVEAAEAIVSLIEALILAVELLYRTGDEQAQRLIESLQKMIELLLELIQRIKETGDPRLVEILKLIVEAAHAIVELIEALILAVELLKRTGDEQAQRLIESLQKMIELLLELIQRIKETGDPRLVEILKLIVRKAFELVFRIKLEILR

SEQ ID NO: 605 - protein, 230 aa, synthetic construct
  REGION 1..230: note = Synthetic
DENEILRKLIELLEELLERLQNGIDAEEIEKQARLVLLAVLAVLLAIHAIHLIQKQGDPENLEILRKLLQLLEELLQRFKNGIDAEEIYKQAVLVMLAVEAVVLAIEAIVLIREQGDPENLEILRKLLQLLEELLQRFKNGIDAEEIYKQAVLVMLAVEAVVLAIEAIVLIREQGDPENLEILRKLLQLLEELLQRFKNGIDAEEIYKQAVLVMHEVERVVTRIRYEYLS

SEQ ID NO: 606 - protein, 266 aa, synthetic construct
  REGION 1..266: note = Synthetic
AERIHEMELNLRQIRLLAERAINLARRLGDPELYELAVQSFKEVLEQARQVIENQRKNPEQAKRILEMLWWLVLILYLALKAIELAKRLGDPELYELAVQSFKEVLEQARQVIENQRKNPEQAKRILEMLWWLVLILYLALKAIELAKRLGDPELYELAVQSFKEVLEQARQVIENQRKNPEQAKRILEMLWWLVLILYLALKAIELAKRLGDPELYELAVQSFKEVLEQARQVIENQRKNPEEARRLLLELYLKVFELFIKLLQL

SEQ ID NO: 607 - protein, 285 aa, synthetic construct
  REGION 1..285: note = Synthetic
SEREEILLEILRLIVELLLIALKIIRLAKELGDPELYRQARETYQELKEELQKVFEIAASSDEEEVKRARELMEILWWIAVLLLIALLIIKLAKELGDPELYRQARETFQELLEELQKVFEIAASSDEEEVKRARELMEILWWIAVLLLIALLIIKLAKELGDPELYRQARETFQELLEELQKVFEIAASSDEEEVKRARELMEILWWIAVLLLIALLIIKLAKELGDPELYRQARETFQELLEELQKVFEIAASSDEEEVKKARNLMELLQLYAEYLLSKLKLS

SEQ ID NO: 608 - protein, 275 aa, synthetic construct
  REGION 1..275: note = Synthetic
DLEAYELLLLAELFLRLIQITAKRAGIPGMFEQAEELIQQIIETMKKAQENVRMGKMSLEDLLLLLEAYLLLARAVYFLVSILLLAKRAGIPGMFEQAEELIQQIIETMKKAQENVRMGKMSLRDLLLLLEAYLLLARAVYFLVVILLLAKRAGIPGMFEQAEELIQQIIETMKKAQENVRMGKMSLEDLLLLLQAYLLLARAVYFLVVILLLAKRAGIPGMFEQAEELIQQIIETMKKAQENVRMGKMSLEDLLRLLHQYLLEAEIVYEKVVKL

SEQ ID NO: 609 - protein, 275 aa, synthetic construct
  REGION 1..275: note = Synthetic
DTEAHQLLLQAEAFLLQIQYLAHIAGIPGMFEQAEELIQQIIETMKKAQENVRMGKMSLEDLLLLLEAYLLLARAVYFLVLILLLALEAGIPGMFEQAEELIQQIIETMKKAQENVRMGKMSLEDLLRLLYAYLLLARAVYFLVRILILAKRAGIPGMFEQAEELIQQIIETMKKAQENVRMGKMSLRELLSLLFAYLLLARAVYFLVVILLLAKRAGIPGMFEQAEELIQQIIETMKKAQENVRMGKMSLEDLQRLLLRLLAEAELLYFQVRLL

SEQ ID NO: 610 - protein, 254 aa, synthetic construct
  REGION 1..254: note = Synthetic
NEKEEMFIRIRTLLYEIRIIAEELGDPEFIETAQQTFREVVEELRKAKEAGSDEEIRRTLEKLLMKALILLLLVRIYFLALQLGDPEFIETAQQTFREVVEELRKAKEAGSDEEIRRTLEKLLMKALILLLLVLIYVLALRLGDPEFIETAQQTFREVVEELRKAKEAGSDEEIRRTLEKLLMKALILLLLVLIYMLAKQLGDPEFIETAQQTFREVVEELRKAKEAGSDEEIRRTLRKLLEKAYRLLTEVRLH

SEQ ID NO: 611 - protein, 238 aa, synthetic construct
  REGION 1..238: note = Synthetic
ITLEELFKRVLHLIILAEEAVRSGDPQEIREIMEEVKQQIRELRQRAKESTDKEITLRLLRLIVELLLILAELAVKSGDPQEIREIMEEVKQQIRELRQRAKESTDKQITLTLLKLIVELLLILAELAVKSGDPQEIREIMEEVKQQIRELRQRAKESTDKEITLTLLKLIVELLLILAQLAQDSGDPQEIREIMEEVKQQIRELRQRAKESTDQHIRIVLQELIAQLETFLEELAKS

SEQ ID NO: 612 - protein, 222 aa, synthetic construct
  REGION 1..222: note = Synthetic
DKIVRLIREARFLVILVYLAAQDAGDPEFQEFAKEILRTLLEIMQMGDLEKAKIVLLIARAALLVVLVYILAKEAGDPEFQEFAKEILRTLLEIMQMGDLEKAKIVLLIARAALLVVLVYILAKQAGDPEFQEFAKEILRTLLEIMQMGDEEKAEIVLLIARAALYVVLVYILAKQAGDPEFQEFAKEILRTLLEIMQMGDYEKAAKVLSLATEAVYKVRKY

SEQ ID NO: 613 - protein, 224 aa, synthetic construct
  REGION 1..224: note = Synthetic
DIFRKIIEILQRIIEEIKELLKNMDEEHSLLHLRLIVLLLIFIAHLASILARYTGDYELIREAIEEIQETIEEIKQQLKNMDEEVSLELLKMIVELLTVIAELASTLARKTGDYELIREAIEEIQETIEEIKQQLKNMDEEVSLELLKMIVELLTVIAELASTLARKTGDYELIREAIEEIQETIEEIKQQLKNMDEEIKYQLLIMILQLEQVIRHLAKTLARK

SEQ ID NO: 614 - protein, 282 aa, synthetic construct
  REGION 1..282: note = Synthetic
DFLERLRAEFEHIARLVELFVLAAEVAGDQRAAEKALELLEKLEEIMQQISELLREKVKQTGDPEEFLQILKQIFRLLAELVELFVLAAEVAGDQRAAEKALELLEKLEEIMQQISELLREKVKQTGDPEEFLQILKQIFRLLAELVELFVLAAEVAGDQRAAEKALELLEKLEEIMQQISELLREKVKQTGDPEEFLQILKQIFRLLAELVELFVLAAEVAGDQRAAEKALELLEKLEEIMQQISELLREKVKQTGDPHLENRIELTELELRHILIRLRDL

SEQ ID NO: 615 - protein, 282 aa, synthetic construct
  REGION 1..282: note = Synthetic
EFLEKLESEFLFLANAVRIHVRLAEELGDQRAAETALELLEKLEEIMQQISELLREKVKQTGDPEEFLQILKQIFRLLAELVELFVLAAEVAGDQRAAEKALELLEKLEEIMQQISELLREKVKQTGDPEEFLQILKQIFRLLAELVELFVLAAEVAGDQRAAEKALELLEKLEEIMQQISELLREKVKQTGDPEEFLQILKQIFRLLAELVELFVLAAEVAGDQRAAEKALELLEKLEEIMQQISELLREKVKQTGDPEEFRQIEKIELELRQRLLHLKEL

SEQ ID NO: 616 - protein, 176 aa, synthetic construct
  REGION 1..176: note = Synthetic
SVDELLLFALELLLRLRYAQKAGDEEKTRRLFEQAKKAYEQAREYFENVDPELSVLWLLIMATVLSVLLEYAQKAGDEEKTRRLFEQAKKAYEQAREYFENVDPELSVLWLLIMATVLSVLLLYAESAGDEEKTRRLFEQAKKAYEQAREYYENVDPELRHLWLEILLIVLYVLFL

SEQ ID NO: 617 - protein, 262 aa, synthetic construct
  REGION 1..262: note = Synthetic
DEELEQLEFEARFEVRRTARQAGFSEEEIKKLVKTMIRLLKEIWQEVQEEIRRLGYSPEDANLLAELLLRAALEVWITALQAGFSEEEIKKLVKTMIRLLKEIWQEVQEEIRRLGYSPEDANLLAELLLRAALEVWITALQAGFSEEEIKKLVKTMIRLLKEIWQEVQEEIRRLGYSPEDANLLAELLLRAALEVWITALQAGFSEEEIKKLVKTMIRLLKEIWQEVQEEIRRLGYSPRDANFEAELRLREILLRWQYELRS

SEQ ID NO: 618 - protein, 256 aa, synthetic construct
  REGION 1..256: note = Synthetic
DRENRLLHLVAEVYYFILHAYLVAKELGDPEQQEVAKQSEEELIKIKQLIQKGVDLEELKRRLELILLVMQVLVWIVRAFRIAKELGDPEQQEVAKQSLEELIKIFQLIQKGVDLEELKRRLELILLVMQVLVWIVRAFRIAKELGDPEQQEVAKQSLEELIKIFQLIQKGVDLEELKRRLELILLVMQVLVWIVRAFRIAKELGDPEQQEVAKQSLEELIKIFQLIQKGVDLEKLKRELRIILLRMEILVNEVES

SEQ ID NO: 619 - protein, 256 aa, synthetic construct
  REGION 1..256: note = Synthetic
DREQELRRLVAEVEYFIRKAFQIAKELGDPEQQEVAKQSLEELIKIFQLIQKGVDLEELKRRLELILLVMQVLVWIVRAFRIAKELGDPEQQEVAKQSLEELIKIFQLIQKGVDLEELKRRLELILLVMQVLVWIVRAFRIAKELGDPEQQEVAKQSLEELIKIFQLIQKGVDLEELKRRLELILLVMQVLVWIVRAFRIAKELGDPEQQEVAKQSLEELIKIFQLIQKGVDLEKLKHLLLLLLLLMQLLVNEVES

SEQ ID NO: 620 - protein, 256 aa, synthetic construct
  REGION 1..256: note = Synthetic
KRREELRKLVREVRSYIHRALVHAQHFGDPEQQEVAKQSEEELIKIEQLIQKGVDLEELKRRLELILLVMQVLVWIVRAFEIAKELGDPEQQEVAKQSLEELIKIFQLIQKGVDLEELKRRLELILLVMQVLVWIVRAFRIAKELGDPEQQEVAKQSLEELIKIFQLIQKGVDLEELKTRLELILLVMQVLVWIVRAFRIAKELGDPEQQEVAKQSLEELIKIFQLIQKGVDLLELLELLHKILVRMRILVRRVED

SEQ ID NO: 621 - protein, 256 aa, synthetic construct
  REGION 1..256: note = Synthetic
DRREELEFLVDRVFTHIILARLIAERLGDPEQQEVAKQSLEELIKIFQLIQKGVDLEELKRRLELILLVMQVLVWIVLAFRVAESQGDPEQQEVAKQSLEELIKIFQLIQKGVDLEELKRRLELILLVMQVLVWIVKAFKIAKELGDPEQQEVAKQSLEELIKIFQLIQKGVDLEELKRRLRLILLVMQVLVWIVRAFRIAKELGDPEQQEVAKQSLEELIKIFQLIQKGVDLHQLYSILVRILEVMEELVKIVEA

SEQ ID NO: 622 - protein, 282 aa, synthetic construct
  REGION 1..282: note = Synthetic
TEILREFANELRLIFLRAERTIRELKQQGVLTPELEELLKLVSELLQRWLEQQKRGELSEEQLLLTAILLWMAALLVLIFARALQTIYELKQQGVLTPELEELLKLVSELLQRWLEQQKRGELSEEQLLLTAILLWMAALLVLIFARALQTIYELKQQGVLTPELEELLKLVSELLQRWLEQQKRGELSEEQLLLTAILLWMAALLVLIFARALQTIYELKQQGVLTPELEELLKRVSELLQRWLEQQKRGELSEEQLLLTAILLWEDALFVLEIARFRQYS

SEQ ID NO: 623 - protein, 250 aa, synthetic construct
  REGION 1..250: note = Synthetic
DEMRELILRVELLLERIHSLVRKLGDPELVRLAEDLLQTIKEAIETFKQGDLEKAKRLVEMALLIALVILLLAEIIEQVRQLGDPELVRLAEDLLQTIKEAIETFKQGDLEKAKRLVEMALLIALVILLLAEIIEQVRQLGDPELVRLAEDLLQTIKEAIETFKQGDLEKAKRLVRMALLIALVILLLAEIIEQVRQLGDPRLVRLAEDLLQTIKEAIETFKQGDLEKAYRLVLKAYVLAIFILLLAEFS

SEQ ID NO: 624 - protein, 201 aa, synthetic construct
  REGION 1..201: note = Synthetic
DKLLELLLEFAKVLIELTLLRLGVSEEQLRQHLKEIWKLILENLKQVFETMKRLGVPPELALLLLLTLAEALARIFVTLLELGVSEEQLRQHLKEIWKLILENLKQVFETMKRLGVPPELALRLLSTLAEALAHIFVTLLRLGVSEEQLRQHLKEIWKLILENLKQVFETMKRLGVPPEHALFQLRQLALELAIRFTRELH

SEQ ID NO: 625 - protein, 221 aa, synthetic construct
  REGION 1..221: note = Synthetic
AERLLREIHLLVERARLLLEQGDLEKAQELLEKIRRNLQEVFEIAKEQGDAKLLLQVIELMVLLAELYLLMGDLEKAQELLEKIRRNLQEVFEIAKEQGDAKLLLQVIELMVLLAELYLLMGDLEKAQELLEKIRRNLQEVFEIAKEQGDAKLLLQVIELMVLLAELYLLMGDLEKAQELLEKIRRNLQEVFEIAKEQGDEELLEIVLRLRIELESLYRNM

SEQ ID NO: 626 - protein, 184 aa, synthetic construct
  REGION 1..184: note = Synthetic
REELEELHVFLARLYALALEAYIKGDEEKLEQIFQLVKRLFEEVKQRAENSDDPRITLLLLELALKALKLMAEIAQKLGDEEKLEQIFQLVKRLFEEVKQRAENSDDPRITLLLLELALKALKLMAEIAQKLGDEEKLEQIFQLVKRLFEEVKQRAENSDDPRIRILLKALAYLALYLLTEIKS

SEQ ID NO: 627 - protein, 184 aa, synthetic construct
  REGION 1..184: note = Synthetic
DEELYQLLAFLIQLFVLALKALRLGDEEKLEQIFQLVKRLFEEVKQRAENSDDPRITLLLLELALKALKLMAEIAQKLGDEEKLEQIFQLVKRLFEEVKQRAENSDDPRITLLLLELALKALKLMAEIAQKLGDEEKLEQIFQLVKRLFEEVKQRAENSDDPRIRLQLEYLATLARELMAEIAQ

SEQ ID NO: 628 - protein, 192 aa, synthetic construct
  REGION 1..192: note = Synthetic
DVSHESYERILELLTKALQALFNGDEEQLQEIWQRLKEQLEELRKELKRAQEEGDPWLVSVASELIILLLLMLAQIASERGDEEQLQEIWQRLKEQLEELRKELKRAQEEGDPWLVSVASLLIILLLLMLANIALRRGDEEQLQEIWQRLKEQLEELRKELKRAQEEGDPWLVEVALRLLHLLRFMLQLIEH

SEQ ID NO: 629 - protein, 207 aa, synthetic construct
  REGION 1..207: note = Synthetic
DTIRDEVRLTALLLELLARELGDEESLQRAREMLEKIAKATSPEELRELQITLQVLFTALKLLELAKKLGDEESLQRAREMLEKIAKATSPEELRELQITLQVLFTALKLLELAKKLGDEESLQRAREMLEKIAKATSPEELRRLQLTLQVLFTALKLLELAKKLGDEESLQRAREMLEKIAKATSPEELIELQVHLRKLFHRLREL

SEQ ID NO: 630 - protein, 239 aa, synthetic construct
  REGION 1..239: note = Synthetic
TDRLHEILEELKSFVHEAHILLHRIDDEETSRRLKEFLEQVLQTAREALERNDPETARLALILVILLFYVLKAILLLKKIDDEETSRRLKEFLEQVLQTAREALERNDPETARLALILVILLYYVLKAILLLKKIDDEETSRRLKEFLEQVLQTAREALERNDPETARLALILVILLYYVLKAILLLKKIDDEETSRRLKEFLEQVLQTAREALERNDPETAHRALLLVRILYLELRLI

SEQ ID NO: 631 - protein, 239 aa, synthetic construct
  REGION 1..239: note = Synthetic
SEELRHILLELELFVLRARKLLRKIDDEETSRRLKEFLEQVLQTAREALERNDPETARLALILVILLYYVLKAILLLKKIDDEETSRRLKEFLEQVLQTAREALERNDPETARLALILVILLYYVLKAILLLKKIDDEETSRRLKEFLEQVLQTAREALERNDPETARLALILVILLYYVLKAILLLKKIDDEETSRRLKEFLEQVLQTAREALERNDPETARRALIQVRTLFLHLELI

SEQ ID NO: 632 - protein, 239 aa, synthetic construct
  REGION 1..239: note = Synthetic
TERLEEILQELEQFVLSAEVLLRHIDDEETSRRLKEFLEQVLQTAREALERNDPETARLALILVILLFYVLRAILLLKKIDDEETSRRLKEFLEQVLQTAREALERNDPETARLALILVILLYYVLKAILLLKKIDDEETSRRLKEFLEQVLQTAREALERNDPETARLALILVILLYYVLKAILLLKKIDDEETSRRLKEFLEQVLQTAREALERNDPHTALQALTLVIILFFELEKI

SEQ ID NO: 633 - protein, 241 aa, synthetic construct
  REGION 1..241: note = Synthetic
DDMEEIVLRLKYLILRAEKLIKKANDEETSERLKQILEEAVKTAVEALRRGDLESLEMALIVAQLIYLIALASLLIQKANDEETSERLKQILEEAVKTAVEALRRGDLESLEMALIVAQLIYLIALASLLIQKANDEETSERLKQILEEAVKTAVEALRRGDLESLEMALIVAQLIYLIALASLLIQKANDEETSERLKQILEEAVKTAVEALRRGDKRSLERALLLAFIIFYQARFSEVH

SEQ ID NO: 634 - protein, 218 aa, synthetic construct
  REGION 1..218: note = Synthetic
SELEREVEEILARIEVLVRQLGDPELKQLAEQLLETIKKATETGSEEDVRLASLIAKVIYMLAKIIELVRRLGDPELKQLAEQLLETIKKATETGSEEDVRLASLIAKVILMLAEIIQLVRELGDPELKQLAEQLLETIKKATETGSEEDVRLASLIAKVILMLAEIIQLVRELGDPELKQLAEQLLETIKKATETGSEEDVREAIRLAQRILTLAEH

SEQ ID NO: 635 - protein, 253 aa, synthetic construct
  REGION 1..253: note = Synthetic
SLHSRLLLLILILALHVYYLILLAKEAGDEESYRKLEEIFQEVRELFEQAKQSGDPRDLLFYLLLAQILLLMAEVLSLILEAKLAGDEESYRKLEEIFQEVRELFEQAKQSGDPRDLLFYLLLAQILLLMAEVLSLILEAKLAGDEESYRKLEEIFQEVRELFEQAKQSGDPRDLLFYLLLAQILLLMAEVLSLILEAKLAGDEESYRKLEEIFQEVRELFEQAKQSGDPRDLREYLLEAEILLYRARILSES

SEQ ID NO: 636 - protein, 253 aa, synthetic construct
  REGION 1..253: note = Synthetic
LLHEHLLRLILKLLNDVHLLIDLAELDGDEESYRKLEEIFQEVRELFEQARQSGDPRDLLFYLLLAQILLLMAEVLSLILEAKLAGDEESYRKLEEIFQEVRELFEQAKQSGDPRDLLFYLLLAQILLLMAEVLSLILEAKLAGDEESYRKLEEIFQEVRELFEQAKQSGDPRDLLFYLLLAQILLLMAEVLSLILEAKLAGDEESYRKLEEIFQEVRELFEQAKQSGDPRDLRQYLLLARELLLQARITSQS

SEQ ID NO: 637 - protein, 253 aa, synthetic construct
  REGION 1..253: note = Synthetic
SEHSHLLALILFLLNVVKLLIEIAKLAGDEESYRKLEEIFQEVRELFEQARQSGDPRDLLFYLLLAQILLLMALVLDLILLAKLAGDEESYRKLEEIFQEVRELFEQAKQSGDPRDLLFYLLLAQILLLMALVLFLILEAKLAGDEESYRKLEEIFQEVRELFEQAKQSGDPRDLRFYLLLAQILLLMAEVLSLILEAKLAGDEESYRKLEEIFQEVRELFEQAKQSGDPRDLSRHLIDAEDLLREARVLSEI

SEQ ID NO: 638 - protein, 253 aa, synthetic construct
  REGION 1..253: note = Synthetic
DERERLYFQIVVIAAEIRRFLRELQQQGNYEIVELIKELVREALRLALEAARLNDPKLLKMALLVVQIALYAAKIAYFLFELQQQGNYEIVELIKELVREALRLALEAARLNDPKLLKMALLVVQIALYAAKIAYFLFELQQQGNYEIVELIKELVREALRLALEAARLNDPKLLKMALLVVQIALYAAKIAYFLFELQQQGNYEIVELIKELVREALRLALEAARLNDPKLLKMALRIVRHALQLAELAKLS

SEQ ID NO: 639 - protein, 253 aa, synthetic construct
  REGION 1..253: note = Synthetic
DQREFLFYYIHAIAIKIRNILKELQQQGNYEIVELIKELVREALRLALEAARLNDPKLLKMALLVVQIALYAAKIAYFLFELQQQGNYEIVELIKELVREALRLALEAARLNDPKLLKMALLVVQIALYAAKIAYFLFELQQQGNYEIVELIKELVREALRLALEAARLNDPKLLKMALLVVQIALYAAKIAYFLFELQQQGNYEIVELIKELVREALRLALEAARLNDPRLLLEALLIVVEALYLARLAHLS

SEQ ID NO: 640 - protein, 253 aa, synthetic construct
  REGION 1..253: note = Synthetic
DEMRILLLQIELIAELIEVLLRRLQQQGNYEIVELIKELVREALRLALEAARLNDPKLLKMALLVVQIALYAAKIAYFLFELQQQGNYEIVELIKELVREALRLALEAARLNDPKLLKMALLVVQIALYAAKIAYFLFELQQQGNYEIVELIKELVREALRLALEAARLNDPKLLEMALLVVQIALYAAKIAYFLFELQQQGNYEIVELIKELVREALRLALEAARLNDPKLLLQALLLVQLALYLARKAYEL

SEQ ID NO: 641 - protein, 253 aa, synthetic construct
  REGION 1..253: note = Synthetic
SEMEYLLRYIELVAQLIEHILEELQRQGNYEIVELIKELVREALRLALEAARLNDPKLLKMALLVVQIALYAARIALFLFELQQQGNYEIVELIKELVREALRLALEAARLNDPELLKMALLVVQIALYAAKIAYFLFELQQQGNYEIVELIKELVREALRLALEAARLNDPKLLQMALTVVQIALYAAKIAYFLFELQQQGNYEIVELIKELVREALRLALEAARLNDPRLLAQALVIVLEALILAEEAYRL

SEQ ID NO: 642 - protein, 238 aa, synthetic construct
  REGION 1..238: note = Synthetic
DEIEELATEIQLIAIRIKKLMKQANDEEVIELIKELLRLALQTAKEALELNDPELLKIALFAVLIALIAVKITILMRQANDEEVIELIKELLRLALQTAKEALELNDPELLKIALFAVLIALIAVKITILMRQANDEEVIELIKELLRLALQTAKEALELNDPELLKIALFAVLIALIAVKITILMRQANDEEVIELIKELLRLALQTAKEALELNDPELLKIALKAVEQALRLVEYT

SEQ ID NO: 643 - protein, 226 aa, synthetic construct
  REGION 1..226: note = Synthetic
DEQERLEIELEFAENLARYAIQLLELMVRLGSDSEEAQELIELLQEAIRIALELVKEYKRTGDEELSEQLRLVVELLEAIALAILAIILLAQMVQAGSDSEEAQELIELLQEAIRIALELVKEYKRTGDEELSEQLRLVVELLRAIALAIKAIILLAQMVQAGSDSEEAQELIELLQEAIRIALELVKEYKRTGDEELSEQLRQVVRELEYLALHILLRIIEAEEV

SEQ ID NO: 644 - protein, 256 aa, synthetic construct
  REGION 1..256: note = Synthetic
DEIEQIRSLVHIVEVKLREAIRLAKKMGDEESAQLAKELARQIIEIAKLMFQTGDPRLFEIAEILALVLEVFAELVKAILLAKKMGDEESAQLAKELARQIIEIAKLMFQTGDPRLFEIAEILALVLEVFAELVKAILLAKKMGDEESAQLAKELARQIIEIAKLMFQTGDPRLFEIAEILALVLEVFAELVKAILLAKKMGDEESAQLAKELARQIIEIAKLMFQTGDPRLRKRARQLAIELLRFALEVRHIESS

SEQ ID NO: 645 - protein, 238 aa, synthetic construct
  REGION 1..238: note = Synthetic
DELEELRTEAQLLIELLKLLVRNLGDPELEKAMQLILELLLQALKANDDEKLEELVRLALLVAVALLLIVELTRQVRRLGDPELEKAMQLILELLLQALKANDDEKLEELVRLALLVAVALLLIVELTEQVRRLGDPELEKAMQLILELLLQALKANDDEKLEELVELALLVAVALLLIVELTEQVRRLGDPELEKAMQLILELLLQALKANDDEKLFHLVTEAYVLALQLLFQVRRT

SEQ ID NO: 646 - protein, 237 aa, synthetic construct
  REGION 1..237: note = Synthetic
DEEELHAHYLAIEAVLTVLRKGEEKALETTIQLIEFLEEMLRKAGMTEEQIERLKQILFIAFAYYLAELAVKTVREKGEEKALETTIQLIEFLEEMLRKAGMTEEQIERLKQILFIAFAELLAVLAVQTVREKGEEKALETTIQLIEFLEEMLRKAGMTEEQIERLKEILFIAFAILLAVLAVQTVREKGEEKALETTIQLIEFLEEMLRKAGMTEEQIERLKEILELAFKLYRNRL

SEQ ID NO: 647 - protein, 246 aa, synthetic construct
  REGION 1..246: note = Synthetic
DETEELELLFELLLRLVRFFYEETGDEQFQEAAEEAQELFERAQEMEEQGDRESLEKYLRTALLVLLFVLLLYIVLRLYERTGDEQFQEAAEEAQELFERAQEMEEQGDFESLEKYLRTALLVLLFVQLLFNVRRNYEETGDEQFQEAAEEAQELFERAQEMEEQGDFESLEKYLRTALLVLLFVLLLYQVLRTYEKTGDEQFQEAAEEAQELFERAQEMEEQGDFESLERYLRRALLVLLHVLLS

SEQ ID NO: 648 - protein, 194 aa, synthetic construct
  REGION 1..194: note = Synthetic
LRQQRVRHTIALVLHLATEAGDEEFYKFAHEALEKAEQGVNVEELLRQLRVFLTILQVLKTAREAGDEEFYKFAKEASEKAQQGVNVEELLRQLRVFLTILQVLKTAREAGDEEFYKFAKEASEKAQQGVNVEELLRQLRVFLTILQVLKTAREAGDEEFYKFAKEASEKAQQGVNVERLFVELHALLHHLRLS

SEQ ID NO: 649 - protein, 224 aa, synthetic construct
  REGION 1..224: note = Synthetic
DQFEENLYEVEVLFYRVILQIERSDDEETMKQLRELAQRALEYAKSKDPEDLQFALNLLLVALLFYRVIEQIKRSDDEETMKQLRELAQRALEYAKSKDPEDLQFALNLLLVALLFYRVIEQIKRSDDEETMKQLRELAQRALEYAKSKDPEDLQFALNLLLVALLFYRVIEQIKRSDDEETMKQLRELAQRALEYAKSKDPHDLHLALLLLLIALNYFQEVRL

SEQ ID NO: 650 - protein, 224 aa, synthetic construct
  REGION 1..224: note = Synthetic
DDEELLRTRVKYLFLRVKKQIKRSDDEETMKQLRELAQRALEYAKSKDPEDLQFALNLLLVALLFYRVIEQIKRSDDEETMKQLRELAQRALEYAKSKDPEDLQFALNLLLVALLFYRVIEQIKRSDDEETMKQLRELAQRALEYAKSKDPEDLQFALNLLLVALLFYRVIEQIKRSDDEETMKQLRELAQKALEFAKSKDPEDLEFALFTLLLALVFFKRVLS

SEQ ID NO: 651 - protein, 207 aa, synthetic construct
  REGION 1..207: note = Synthetic
SKQERELIELVITAQLLALLNGDEEALEIVKEMLRQARNAKSEEQRREIKQILELLTLVLEAYNLAKENGDEEALEIVKEMLRQAQNAKSEEQRREIKQILELLTLVLEAYKLAKENGDEEALEIVKEMLRQAQNAKSEEQRREIKQILELLTLVLEAYKLAKENGDEEALEIVKEMLRQAQNAKSEEQRREIRKILLKLTVELRAH

SEQ ID NO: 652 - protein, 211 aa, synthetic construct
  REGION 1..211: note = Synthetic
DDLLLELFRIITEVELIARKMGDDETQERARQLLEQAERYASDPEFLKLMLLLAQLILLILLVIELAKKMGDDETQERARQLLEQAERYASDPEFLKLMLLLAQLILLILLVIELAKKMGDDETQERARQLLEQAERYASDPHFLHLMLLLAQLILLILLVIELAKKMGDDETQERARQLLEQAERYASDPRFLLQLLVQALYILLVLRYS

SEQ ID NO: 653 - protein, 222 aa, synthetic construct
  REGION 1..222: note = Synthetic
DELEELQVLALRLAAQIISLARRLGDQETIEEARRTQEQVEEMYERGDEQKLRLLTTLLQALLLALQIIYIAKKLGDQETIEEARRTQEQVIEMHERGDEQKLRLLTTLLQALLLALQIIEIAKKLGDQETIEEARRTQEQVIEMHERGDEQKLRLLTTLLQALLLALQIIEIAKKLGDQETIEEARRTQEQVIEMHERGDEKKLLRLTLKLEYILLRLEIS

SEQ ID NO: 654 - protein, 222 aa, synthetic construct
  REGION 1..222: note = Synthetic
DRLFQTLLEAIHLAIQIRYLAEKLGDQETIEEARRTQEQVIEMHERGDEQKLRLLTTLLQALLLALQIIEIAKKLGDQETIEEARRTQEQVIEMHERGDEQKLRLLTTLLQALLLALQIIEIAKKLGDQETIEEARRTQEQVIEMHERGDEQKLRLLTTLLQALLLALQIIEIAKKLGDQETIEEARRTQEQVIEMHERGDEEKLTRLTFKLESILTELEQR

SEQ ID NO: 655 - protein, 222 aa, synthetic construct
  REGION 1..222: note = Synthetic
DRLHETLLRAELLAQLIQYLAKQLGDQETIEEARRTQEQVIEMHERGDEQKLRLLTTLLQALLLALLIIRIAKKLGDQETIEEARRTQEQVIEMHERGDEQKLRLLTTLLQALLLALQIIEIAKKLGDQETIEEARRTQEQVIEMHERGDERKLELLTTLLQALLLALQIIEIAKKLGDQETIEEARRTQEQVIEMHERGDLEKLRKLTTQLELLLKELQRI

SEQ ID NO: 656 - protein, 214 aa, synthetic construct
  REGION 1..214: note = Synthetic
DDEEQLILKILLILTKILKLAREMGDEEMYQTAQELRRRVKEAGTDEEKLKILLITAEIVYILALISVLAKEMGDEEMYQTAQELLRRVKEAGTDEEKLKILLITAEIVYILALISVLAKEMGDEEMYQTAQELLRRVKEAGTDEEKLKILLITAEIVYILALISVLAKEMGDEEMYQTAQELLRRVKEAGTDERKLKELLLQALHLFYRARVS

SEQ ID NO: 657 - protein, 225 aa, synthetic construct
  REGION 1..225: note = Synthetic
DTELEAIEIALKAIAIAYTIFYLTGDPKALEIIRLLTELIKRVESGIDTEEILTIVEAMLLAVQAIKLAIEIYRQTGDPKALEISRLLTELIKRVASGIDTEEILTIVEAMLLAVQAIKLAIEIYRQTGDPKALEISRLLTELIKRVASGIDTEEILTIVEAMLLAVQAIKLAIEIYRQTGDPKALEISRLLTELIKRVASGIDTEEILRIVERILNQVRDIYLS

SEQ ID NO: 658 - protein, 213 aa, synthetic construct
  REGION 1..213: note = Synthetic
DIERLILRAESILTEARLLAREAGDEELSEILKRLMKQIVRHPSDPEKIEILLQIARALLLLIEAVLLAQEAGDEELSEILKRLMKQIVRHPSDPEKIEILLQIARALLLLIEAVLLAQEAGDEELSEILKRLMKQIVRHPSDPEKIEILLQIARALLLLIEAVLLAQEAGDEELSEILKRLMKQIVRHPSDPEKILKLLVIAFLLLNRIRKS

SEQ ID NO: 659 - protein, 213 aa, synthetic construct
  REGION 1..213: note = Synthetic
EIEHQINEARVFLFQAVLLAEEAGDEELSEILKRLMKQIVRHPSDPEKIEILLQIARALLLLIEAVVLAQEAGDEELSEILKRLMKQIVRHPSDPEKIEILLQIARALLLLIEAVLLAQEAGDEELSEILKRLMKQIVRHPSDPEKIRILLLIARALLLLIEAVLLAQEAGDEELSEILKRLMKQIVRHPSDPEKIIELLVIAYELLLRIRQS

SEQ ID NO: 660 - protein, 222 aa, synthetic construct
  REGION 1..222: note = Synthetic
SRLEKLVLEILRLFSRLETLVRYAGDMETLRKAKEIAQRAFEAALSGDLETLRLMLLVLQILYIFIELKLQVKEAGDMETLRKAKEIAQRAFEAALSGDLETLRLMLLVLQILQIFIELKQQVKEAGDMETLRKAKEIAQRAFEAALSGDLHTLRLMLIVLQILQIFIELKQQVKEAGDMETLRKAKEIAQRAFEAALSGDYETLLELLFRLRLLQRRIEFS

SEQ ID NO: 661 - protein, 218 aa, synthetic construct
  REGION 1..218: note = Synthetic
SEMEKLLLRAKEILHQLLEIAQELGDEELQEKAREVLQRLFENSFRDPEFVEMALLLLKAIIILLKLLEIAQKLGDEELQEKAREVLQRLFENSFRDPEFVEMALLLLKAIIILLKLLEIAQKLGDEELQEKAREVLQRLFENSFRDPEFVEMALLLLKAIIILLKLLEIAQKLGDEELQEKAREVLQRLFENSFRDPHFVHLALLRLEYIIFELEHS

SEQ ID NO: 662 - protein, 226 aa, synthetic construct
  REGION 1..226: note = Synthetic
DELLEEIARLITRLRTLMEEAKKQGNEVWEILKEALEEASKAYRSGDPEQIRRAILLVEIAILVFELLQLMKQAKKQGNEVWEILKEALEEASKAFRSGDPEQIRRAILLVEIAILVFELLQLMKQAKKQGNEVWEILKEALEEASKAFRSGDPEQIRRAILLVEIAILVFELLQLMKQAKKQGNRVWETLKRALEFASKAFRSGDPTEIQLAIFIVLVAIELFEQ

SEQ ID NO: 663 - protein, 256 aa, synthetic construct
  REGION 1..256: note = Synthetic
DRREELLLEALLLLTRAYRIAKELLERTGDPEAKEILEQIKQTSEEVIRAFRAGDEEKLRMALLLATALYYLVRAFLLAKQLLERTGDPEAKEILEQIKQTSEEVIRAFRAGDEEKLRMALLLATALYYLVRAFLLAKQLLERTGDPEAKEILEQIKQTSEEVIRAFRAGDEEKLRMALLLATALYFLVRAFLLAKQLLERTGDPEAKEILEQIKQTSEEVIRAFRAGDELRLYEALVLAIYIYVQVELILREKQS

SEQ ID NO: 664 - protein, 225 aa, synthetic construct
  REGION 1..225: note = Synthetic
DELEELLLELLLLVLRALIIAKRLGDEETYQELREISEQAKRAMEAGDPEKLKLLLLLVILLYFVVQALEIAKRLGDEETYQELREISEQAKRAMEAGDPEKLKLLLLLVILLYFVVQALEIAKRLGDEETYQELREISEQAKRAMEAGDPEKLKLLLLLVILLYFVVQALEIAKRLGDEETYQELREISEQAKRAMEAGDPEKLERLLTEVRILYRRVQALEIA

SEQ ID NO: 665 - protein, 225 aa, synthetic construct
  REGION 1..225: note = Synthetic
DELEYLFAELLFLVLEALEIARRLGDEETYQELREILEQAKRAMEAGDPEKLKLLLLLVILLYFVVQALEIAKRLGDEETYQELREISEQAKRAMEAGDPEKLKLLLLLVILLYFVVQALEIAKRLGDEETYQELREISEQAKRAMEAGDPEKLKLLLLLVILLYFVVQALEIAKRLGDEETYQELREISEQAKRAMEAGDPEKLRRLLYEVKFLYEQVQKLEIS

SEQ ID NO: 666 - protein, 207 aa, synthetic construct
  REGION 1..207: note = Synthetic
LELIREVERILTEARYLAKEMGDEESFELLKQLVQRASQGVDPEELRTLLLIAKVMLILLEALKLAKEMGDEESFELLKQLVQRASQGVDPEELRTLLLIAKVMLILLEALKLAKEMGDEESFELLKQLVQRASQGVDPEELRTLLLIAKVMLILLEALKLAKEMGDEESFELLKQLVQRASQGVDPEELRKLLLLAHRLLIELRLS

SEQ ID NO: 667 - protein, 214 aa, synthetic construct
  REGION 1..214: note = Synthetic
SKEQEIYIRIEFILQQIEVLAQEMGDEEMYQTAQELLRRVKEAGTDEEKLKILLITAEIVYILALISVLAKEMGDEEMYQTAQELLRRVKEAGTDEEKLKILLITAEIVYILALISVLAKEMGDEEMYQTAQELLRRVKEAGTDEEKLKILLITAEIVYILALISVLAKEMGDEEMYQTAQELLRRVKEAGTDEEKLRELLLLALEVYLRARRS

SEQ ID NO: 668 - protein, 219 aa, synthetic construct
  REGION 1..219: note = Synthetic
DELFKEASRFVFDALAIARNLGDEELLEMAKIVHQLLEEIRRLGDEEKIQFLLLVAQALTYVVLATNYARELGDEELLEMAKIVLQLLEEIVRLGDEEKIQFLLLVAQALTYVVLATKYARELGDEELLEMAKIVLQLLEEIVRLGDEEKIQFLLLVAQALTYVVLATKYARELGDEELLEMAKIVLQLLEEIVRLGDEEKIRRLLLLAIRLTSEVRTS

SEQ ID NO: 669 - protein, 219 aa, synthetic construct
  REGION 1..219: note = Synthetic
SELEEEAERFVRDAEVIAKYLGDEELLEMAKIVLQLLEEIVRLGDEEKIQFLLLVAQALTYVVLATKYARELGDEELLEMAKIVLQLLEEIVRLGDEEKIQFLLLVAQALTYVVLATKYARELGDEELLEMAKIVLQLLEEIVRLGDEEKIRFLLLVAQALTYVVLATKYARELGDEELLEMAKIVLQLLEEIVRLGDEEKIRELLAIAVHLTFLVRNS

SEQ ID NO: 670 - protein, 238 aa, synthetic construct
  REGION 1..238: note = Synthetic
DELAIRAEYLIRLAERIARRVTDEEQLRQSLEIVQRILEELKRVFLNGDEEKLKFVLLAAQAILLILLALEHAQSVTDEEQLRQSLEIVQRILEELKRVFLNGDEEKLKFVLLAAQAILLILLALEHAQSVTDEEQLRQSLEIVQRILEELKRVFLNGDEEKLHFVLLAAQAILLILLALEHAQSVTDEEQLRQSLEIVQRILEELKRVFLNGDEKRLIEVLQLALEILLHLRYLEEL

SEQ ID NO: 671 - protein, 219 aa, synthetic construct
  REGION 1..219: note = Synthetic
DELFLRALEFIFLIQHLAEELGDEESSKRARELREQLEEVLQRGDPEKLRLILLFVQAMYYIILIIKLAEELGDEESSKRARELLEQLEEVLQRGDPEKLRLILLFVQAMYYIILIIKLAEELGDEESSKRARELLEQLEEVLQRGDPEKLRLILLFVQAMYYIILIIKLAEELGDEESSKRARELLEQLEEVLQRGDPKELEKILSQVRSIFRQIEIS

SEQ ID NO: 672 - protein, 222 aa, synthetic construct
  REGION 1..222: note = Synthetic
DELRFLVVEAELLILVAEHIARYLGDEKLLEVMRRILEFLKEALQRGDMEKVKLVWLVALALVLIALASLLAELLGDEKLLEVMRRILEFLKEALQRGDMEKVKLVWLVALALYLIALASLLARELGDEKLLEVMRRILEFLKEALQRGDMKKVLLVTLVAFALYLIALASKLAQELGDEKLLEVMRRILEFLKEALQRGDHQKVSHVLRLATELLTEAEIS

SEQ ID NO: 673 - protein, 219 aa, synthetic construct
  REGION 1..219: note = Synthetic
DEFVYEVKAILIRAEILARQAGNEELLEILKEALRSLEEILKAGDLEKARMVWFVALVILLLALAFILAQQAGNEELLEILKEALRSLEEILKAGDLEKARMVWFVALVILLLALAFILAQQAGNEELLEILKEALRSLEEILKAGDLEKARMVWFVALVILLLALAFILAQQAGNEELLEILKEALRSLEEILKAGDLEKARRVFYLAQRILLEAEEF

SEQ ID NO: 674 - protein, 219 aa, synthetic construct
  REGION 1..219: note = Synthetic
VHFVEEVELILETAHRIAQRAGNEELLEILKEALRSLEEILKAGDLEKARMVWFVALVILLLARAFLLAQQAGNEELLEILKEALRSLEEILKAGDLEKAEMVWFVALVILLLALAFILAQQAGNEELLEILKEALRSLEEILKAGDREKAIMVFYVALVILLLALAFILAQQAGNEELLEILKEALRSLEEILKAGDYRKALEVVYLAQRILEEARQF

SEQ ID NO: 675 - protein, 247 aa, synthetic construct
  REGION 1..247: note = Synthetic
QRELRLLFLQVELLIHRALELAQKAGDEELVEIARTAAEFLKRALENSRKNDEEALKQIKLVYMFASVVYLIAQALLLAQKAGDEELVEIARTAAEFLKRALENSRKNDEEALKQIKLVYMFASVVYLIAQALLLAQKAGDEELVEIARTAAEFLKRALENSRKNDEEALKQIKLVYMFASVVYLIAQALLLAQKAGDEELVELARTAAEFLKRALENSRKNDEEALKQIERVYFFAQFVYFEAYLL

SEQ ID NO: 676 - protein, 247 aa, synthetic construct
  REGION 1..247: note = Synthetic
QEELRLLFLEVEVLIYRAEQLAQKAGDEELVEIARTAAEFLKRALENSRKNDEEALKQIKLVYMFASVVYLIAQALLLAQKAGDEELVEIARTAAEFLKRALENSRKNDEEALKQIKLVYMFASVVYLIAQALLLAQKAGDEELVEIARTAAEFLKRALENSRKNDEEALKQIKLVYMFASVVYLIAQALLLAQKAGDEELVEIARTAAEFLKRALENSRKNDLEAESLILHVYVFARQVLNKARQL

SEQ ID NO: 677 - protein, 222 aa, synthetic construct
  REGION 1..222: note = Synthetic
DELELLELQIRVLLLRAEVIMKRLGDEELWKLIQKAQELLKEAIERGDEELLRLAFLVVQIILLLALATEIMQRLGDEELWKLIQKAQELLKEAIERGDEELLRLAFLVVQIILLLALATEIMQRLGDEELWKLIQKAQELLKEAIERGDEELLRLAFLVVQIILLLALATEIMQRLGDEELWKLIQKAQELLKEAIERGDEELLREARYLVLEILTHARYL

SEQ ID NO: 678 - protein, 214 aa, synthetic construct
  REGION 1..214: note = Synthetic
DEIEEIIIRIRVILYQIELLAELMGDEEMYQTAQELLRRVKEAGTDEEKLKILLITAEIVLILALISRLAHHMGDEEMYQTAQELLRRVKEAGTDEEKLKILLITAEIVYILALISVLAKEMGDEEMYQTAQELLRRVKEAGTDEEKLKILLLTARIVYILALISVLAKEMGDEEMYQTAQELLRRVKEAGTDLEKLLKLYALASELLARAELS

SEQ ID NO: 679 - protein, 281 aa, synthetic construct
  REGION 1..281: note = Synthetic
DELEEIVLKIELILLQARQIMKELREQGNEEQAKQLLRLIQKVIEFVERVQELIKQGDYEEAKRFLELALLLAKIALLLAQAIQIMIELREQGNEEQAKQLLRLIQKVIEFVERVQELIKQGDYEEAKRFLELALLLAKIALLLAQAIQIMIELREQGNEEQAKQLLRLIQKVIEFVERVQELIKQGDYEEAKRFLELALLLAKIALLLAQAIQIMIELREQGNEEQAKQLLRLIQKVIEFVERVQELIKQGDYEEAKKFLRRAFLLALIALTIARSVLES

SEQ ID NO: 680 - protein, 253 aa, synthetic construct
  REGION 1..253: note = Synthetic
DELERLEFEIRTILHQAELIALELERQGNKEWAKQILEQIRRILETVKQAKREGDKENLELALLMAWIVLLLVLAIKIAVELEQQGNKEWAKQILEQIRRILETVKQAKREGDKENLELALLMAWIVLLLVLAIKIAVELEQQGNKEWAKQILEQIRRILETVKQAKREGDKENLELALLMAWIVLLLVLAIKIAVELEQQGNKEWAKQILEQIRRILETVKQAKREGDKENLELARRLAERVLLLVRYIKVS

SEQ ID NO: 681 - protein, 253 aa, synthetic construct
  REGION 1..253: note = Synthetic
SELELIRQHIHYLLEKAEHIARELEQQGNKEWAKQILEQIRRILETVKQAKREGDKENLELALLMAWIVLLLVLAIKIAVELEQQGNKEWAKQILEQIRRILETVKQAKREGDKENLELALLMAWIVLLLVLAIKIAVELEQQGNKEWAKQILEQIRRILETVKQAKREGDKKNLELALLMAYIVLLLVLAIKIAVELEQQGNKEWAKQILEQIRRILETVKQAKREGDKENLIRAYALAVEVLLLVRLIKES

SEQ ID NO: 682 - protein, 253 aa, synthetic construct
  REGION 1..253: note = Synthetic
DELERLEFEIKILLSSAEFTARLLEDLGNKEWAKQILEQIRRILETVKQAKREGDKENLELALLMAWIVLLLVRAILIAVELEEQGNKEWAKQILEQIRRILETVKQAKREGDKENLELALLMAWIVLLLVLAIKIAVELEQQGNKEWAKQILEQIRRILETVKQAKREGDKENLELALIMAWIVLLLVLAIKIAVELEQQGNKEWAKQILEQIRRILETVKQAKREGDKQNLLRAKLLALRVLVEVRYIKES

SEQ ID NO: 683 - protein, 225 aa, synthetic construct
  REGION 1..225: note = Synthetic
DEREELELKVRHLLLLAQLLVERLGDEELRELIELAMETLKKAIQEGDLETLRMVYLIASVVLLLAQALELVKRLGDEELRELIELAMETLKKAIQEGDLETLRMVYLIASVVLLLAQALELVKRLGDEELRELIELAMETLKKAIQEGDLETLRFVYNIAEVVLILAQALELVKRLGDEELRELIELAMETLKKAIQEGDKETLIEVTILAYRVLVLARLLEER

SEQ ID NO: 684 - protein, 225 aa, synthetic construct
  REGION 1..225: note = Synthetic
DRSEHLFVEVATILNEAHNLVHYLGDEELRELIELAMETLKKARQEGDLETLRMVYLIASVVLLLAQALKLVRKLGDEELRELIELAMETLKKAIQEGDLETLRMVYLIASVVLLLAQALELVKRLGDEELRELIELAMETLKKAIQEGDLETLRMVYLIASVVLLLAQALELVKRLGDEELRELIELAMETLKKAIQEGDLETLRMVYELARRVLVEAIYKEVS

SEQ ID NO: 685 - protein, 225 aa, synthetic construct
  REGION 1..225: note = Synthetic
DERRFLEIQVQVILNSARTLVEFLGDEELRELIELAMETLKKAIQEGDLETLRMVYLIASVVLLLAEALLFVLNLGDEELRELIELAMETLKKAIQEGDLETLRMVYLIASVVLLLAQALQLVKRLGDEELRELIELAMETLKKAIQEGDRETLRFVYLIAIVVLLLAQALELVKRLGDEELRELIELAMETLKKAIQEGDEKTLKKVLEIAHQVLIEAIYLELS

SEQ ID NO: 686 - protein, 222 aa, synthetic construct
  REGION 1..222: note = Synthetic
DRLELTIERIFRYAVLIQFLAENMNDEETTKRVRELLEKAEEAYEAGDEESLRLLLTIIQILLYAVRIIILAQRMNDEETTKRVRELMEKAFEANEAGDEESLRLLLTIIQILLYAVQIIILAQEMNDEETTKRVRELMEKAFEANEAGDEESLRLLLIIIQILLYAVQIIILAQEMNDEETTKRVRELMEKAFEANEAGDEESLRELYIQIIHLLLRVRTS

SEQ ID NO: 687 - protein, 192 aa, synthetic construct
  REGION 1..192: note = Synthetic
SEFTRVLIVLLLVLLLAEELGDEELERLIREMLRRVREIEKRGDYEKAQRLSELAKVALLLLQVFKYAKELGDEELLRLIQEMIERVLEIIKRGDYEKAQRLSELAKVALLLLQVFKYAKELGDEELLRLIQEMIERVLEIIKRGDYEKAQRLSELARRALQLLEAFKIALELGDEELLRHLQRTIERVLEI

SEQ ID NO: 688 - protein, 192 aa, synthetic construct
  REGION 1..192: note = Synthetic
SDEVRVLIILLLVLLLADELGDEELKRLIEEMIERVLEIIKRGDYEKAQRLSELAKVALLLLQVFKYAKELGDEELLRLIQEMIERVLEIIKRGDYEKAQRLSELAKVALLLLQVFKYAKELGDEELLRLIQEMIERVLEIIKRGDYEKAQRLSEFAQLALVLLLVFKTAKELGDEELLRTIQRLIERVLES

SEQ ID NO: 689 - protein, 214 aa, synthetic construct
  REGION 1..214: note = Synthetic
DKIEEIIVRIQQILFQIELLARLMGDEEMYQTAQELLRRVKEAGTDEEKLKILLITAEIVFILALISRLARRMGDEEMYQTAQELLRRVKEAGTDEEKLKILLITAEIVYILALISVLAKEMGDEEMYQTAQELLRRVKEAGTDEEKLKILLITAEIVYILALISVLAKEMGDEEMYQTAQELLRRVKEAGTDEEKLKELRRLAQEVYLRARES

SEQ ID NO: 690 - protein, 202 aa, synthetic construct
  REGION 1..202: note = Synthetic
DELEAELFKYMFYIELLYKRYGDEQAREAVQRAREVLEAGDEEQIRKALLLLQLIKTMIEIEELYKKYGDEQAREAVQRAREVFEAGDEEQIRKALLLLQLIKTMIEIEELYKKYGDEQAREAVQRAREVFEAGDEEQIRKALLLLQLIKTMIEIEELYKKYGDEEAREAVQRAREVFEAGDHRQIRRALHDLELIKEEIEH

SEQ ID NO: 691 - protein, 250 aa, synthetic construct
  REGION 1..250: note = Synthetic
VYIAEQIHRLLLKIEFLLHLIKRNGNYEEMKELKELFEELVELLRQALQNGDEESLRFVYIAVQILLLLAQIIILLRKIKQQGNYEEMKELKELFEELVELLRQALQNGDEESLRFVYIAVQILLLLAQIIILLRKIKQQGNYEEMKELKELFEELVELLRQALQNGDEESLRFVYIAVQILLLLAQIIILLRKIKQQGNYEEMKELKELFEELVELLRQALQNGDEESLRFVLRLVRYLLLLAELILLN

SEQ ID NO: 692 - protein, 250 aa, synthetic construct
  REGION 1..250: note = Synthetic
DEIAFEIEELLDKIRHLLLRIKRQGNYEEMKELKELFEELVELLRQALQNGDEESLRFVYIAVQILLLLAQIIILLRKIKQQGNYEEMKELKELFEELVELLRQALQNGDEESLRFVYIAVQILLLLAQIIILLRKIKQQGNYEEMKELKELFEELVELLRQALQNGDEESLRFVYIAVQILLLLAQIIILLRKIKQQGNYEEMKELKELFEELVELLRQALQNGDEESLRFVLRLVEILLLQARIILLS

SEQ ID NO: 693 - protein, 250 aa, synthetic construct
  REGION 1..250: note = Synthetic
SELANRIRQLLLEIEQLLKKIKQQGNYEEMKELKELFEELVELLRQALQNGDEESLRFVYIAVQILLLLAQIIILLRKIKQQGNYEEMKELKELFEELVELLRQALQNGDEESLRFVYIAVQILLLLAQIIILLRKIKQQGNYEEMKELKELFEELVELLRQALQNGDEESLRFVYIAVQILLLLAQIIILLRKIKQQGNYEEMKELKELFEELVELLRQALQNGDEKLLREVFHRVLVLLLLAELILVS

SEQ ID NO: 694 - protein, 250 aa, synthetic construct
  REGION 1..250: note = Synthetic
DEIAQEIHLLLLRIEQLLEEIKKQGNYEEMKELKELFEELVELLRQALQNGDEESLRFVYIAVQILLLLAQIIILLRKIKQQGNYEEMKELKELFEELVELLRQALQNGDEESLRFVYIAVQILLLLAQIIILLRKIKQQGNYEEMKELKELFEELVELLRQALQNGDEESLRFVYIAVQILLLLAQIIILLRKIKQQGNYEEMKELKELFEELVELLRQALQNGDEESLRRVLRRVESLLLQARVILLN

SEQ ID NO: 695 - protein, 250 aa, synthetic construct
  REGION 1..250: note = Synthetic
SEIELKIERLLLQIEILLRYIKEQGNYEEMKELKELFEELVELLRQALQNGDEESLRFVYIAVQILLLLAQIIILLRKIKQQGNYEEMKELKELFEELVELLRQALQNGDEESLRFVYIAVQILLLLAQIIILLRKIKQQGNYEEMKELKELFEELVELLRQALQNGDEESLRFVYIAVQILLLLAQIIILLRKIKQQGNYEEMKELKELFEELVELLRQALQNGDEHLLKRVLNLVLELFVRAEYILNS

SEQ ID NO: 696 - protein, 253 aa, synthetic construct
  REGION 1..253: note = Synthetic
DEIEYLIVEALVLLHIALLLALRLHLAGNEEIAKRIREILKQLREKLMQATENGDPETVRLVLEIAEALSLLMQAFLLALELKEAGNVEIAKRILEILKQLLEKLMQATENGDPETVRLVLEIAEALSLLMQAFLLALELKEAGNVEIAKRILEILKQLLEKLMQATENGDPETVRLVLEIAEALSLLMQAFLLALELKEAGNVEIAKRILEILKQLLEKLMQATENGDPETVEEVRILAEILSLEMRYHLYS

SEQ ID NO: 697 - protein, 253 aa, synthetic construct
  REGION 1..253: note = Synthetic
DEIEHLITHALVLLFIAHQLALQLRRAGNVEIAKRILEILKQLLEKLMQATENGDPETVRLVLEIAEALSLLMQAFLLALELKEAGNVEIAKRILEILKQLLEKLMQATENGDPETVRLVLEIAEALSLLMQAFLLALELKEAGNVEIAKRILEILKQLLEKLMQATENGDPETVRLVLEIAEALSLLMQAFLLALELKEAGNVEIAKRILEILKQLLEKLMQATENGDPRTVIEVLAIAFYLSFHMRLHLES

SEQ ID NO: 698 - protein, 253 aa, synthetic construct
  REGION 1..253: note = Synthetic
DELEELIARALLLLYEAFRLALELKEAGNVEIAKRILEILKQLEEKLRQATENGDPETVRLVLEIAEALSLLMQAFLLALELKEAGNVEIAKRILEILKQLLEKLMQATENGDPETVRLVLEIAEALSLLMQAFLLALELKEAGNVEIAKRILEILKQLLEKLMQATENGDPETVRLVLEIAEALSLLMQAFLLALELKEAGNVEIAKRILEILKQLLEKLMQATENGDPKTVHRVLQQARINSLQMRLFLQD

SEQ ID NO: 699 - protein, 253 aa, synthetic construct
  REGION 1..253: note = Synthetic
DDLETLIRHAELYLDIAKRLAEHLKEAGNVEIAKRILEILKQLLEKLMQATENGDPHTVRLVLLIAEALVLLMLAFLNALDLKRAGNVEIAKRILEILKQLLEKLMQATERGDPHTVHLVLLIAEALSLLMEAFLLALLLKRAGNVEIAKRILEILKQLLEKLMQATENGDPRTVLLVLLIARALSHLMRAFLAALELKEAGNVEIAKRILEILKQLLEKLMQATENGDPQIVAEVYIIAIELYLEMLRFLLS

SEQ ID NO: 700 - protein, 225 aa, synthetic construct
  REGION 1..225: note = Synthetic
DKLRELVTKALVLIFTALLIAENTGDEELSEIAQRLLELVREIFKSGDPEELKLLLLVVQAIYYIALAMYIARKTGDEELSEIAQRLLELVREIFKSGDPEELKLLLLVVQAIWYIALAMLIAKQTGDEELSEIAQRLLELVREIFKSGDPEELELLLLVVRAIWFIALAMLIAKQTGDEELSEIAQRLLELVREIFKSGDPRELNELFLRVVHLTFRARLRLRS

SEQ ID NO: 701 - protein, 214 aa, synthetic construct
  REGION 1..214: note = Synthetic
DEIEQLRNQIEFILRLIESIAEYMGDEEMYQTAQELLRRVKEAGTDEEKLKILLITAEIVFILALISFLAHLLGDEEMYQTAQELLRRVKEAGTDEEKLKILLITARIVYILALISLLASRMGDEEMYQTAQELLRRVKEAGTDEEKLKILLITALIVYILALISVLAKEMGDEEMYQTAQELLRRVKEAGTDEEKLERLFRLAAELYLRALRS

SEQ ID NO: 702 - protein, 219 aa, synthetic construct
  REGION 1..219: note = Synthetic
DFELEEAENLVTLIRTLAKLLGDEEFLRIAKEILRQLEEVWKSGDPEELRLILTLAKAMLLVLRITHFAQQLGDEEFLRIAKEILRQLEEVWKSGDPEELRLILTLAKAMLLVLQITWFAQQLGDEEFLRIAKEILRQLEEVWKSGDPEELLLILLLAKAMLLVLQITWFAQQLGDEEFLRIAKEILRQLEEVWKSGDPELLLKILHIAYQMLLRLKRT

SEQ ID NO: 703 - protein, 225 aa, synthetic construct
  REGION 1..225: note = Synthetic
DEFEKLLAELRILINRALQLFHESGDEEILQLVREMKELVERAKQSGDPETLKFIFLLVELLWLIAEAILLYKQSGDEEILQLVREMKELVERAKQSGDPETLKFIFLLVELLWLIAEAILLYKQSGDEEILQLVREMKELVERAKQSGDPETLKFIFLLVELLWLIAEAILLYKQSGDEEILQLVREMKELVERAKQSGDPETLKFIFQQVRVLFQLAEALLQS

SEQ ID NO: 704 - protein, 225 aa, synthetic construct
  REGION 1..225: note = Synthetic
SEHEELLTQLEHLILRAEHLYRESGDEEILQLVREMKELVERAKQSGDPETLKFIFLLVELLWLIAEAILLYKQSGDEEILQLVREMKELVERAKQSGDPETLKFIFLLVELLWLIAEAILLYKQSGDEEILQLVREMKELVERAKQSGDPETLKFIFLLVELLWLIAEAILLYKQSGDERILQLVREMKELVERAKQSGDPKLLLEIFIRVKYLAELARLVLRS

SEQ ID NO: 705 - protein, 225 aa, synthetic construct
  REGION 1..225: note = Synthetic
SKFEELLYKLLQLIVEARLLARLSGDEEILQLVREMKELVERAKQSGDPETLKFIFLLVELLWLIAEAILLYKQSGDEEILQLVREMKELVERAKQSGDPETLKFIFLLVELLWLIAEAILLYKQSGDEEILQLVREMKELVERAKQSGDPETLKFIFLLVELLWLIAEAILLYKQSGDEEILQLVREMKELVERAKQSGDPETLKRIFEHVRNLFDRAEVIFRS

SEQ ID NO: 706 - protein, 222 aa, synthetic construct
  REGION 1..222: note = Synthetic
DEKEERLIRAYSLIVEAELFARYLGNEESLEEIRQILRQFQEAKETGNPEEIEKVLRLVEAILLILQAMLFALRLGNEESLEEIRQILRQFQEAKETGNPEEIEKVLRLVEAILLILKAMLFAKQLGNEESLEEIRQILRQFQEAKETGNPREILKVLNLVEAILLILKAMLFAKQLGNEESLEEIRQILRQFQEAKETGNPEEISKVLILVQRILEHLKLL

SEQ ID NO: 707 - protein, 253 aa, synthetic construct
  REGION 1..253: note = Synthetic
DEEEQLELHVLLLISKARQLAKEIRQLGDEEFAQEVEELVEQISRLLKRAIQEGDPELLELASLIAKVLLLILLALLMAKKIRQLGDEEFAQEVEELVEQISRLLKRAIQEGDPELLELASLIAKVLLLILLALLMAKKIRQLGDEEFAQEVEELVEQISRLLKRAIQEGDPELLELASLIAKVLLLILLALLMAKKIRQLGDEEFAQEVEELVEQISRLLKRAIQEGDPRLLRRAYAFALILLLILQRFLDS

SEQ ID NO: 708 - protein, 253 aa, synthetic construct
  REGION 1..253: note = Synthetic
DEERELRIRVEHLIRLAKLLAERIRKLGDEEFAQEVEELVEQISRLLKRAIQEGDPELLELASLIAKVLLLILLALLMAKKIRQLGDEEFAQEVEELVEQISRLLKRAIQEGDPELLELASLIAKVLLLILLALLMAKKIRQLGDEEFAQEVEELVEQISRLLKRAIQEGDPHLLQLASLIAKVLLLILLALLMAKKIRQLGDEEFAQEVEELVEQISRLLKRAIQEGDPHLLNKAFSIAVELLLQLELALQS

SEQ ID NO: 709 - protein, 253 aa, synthetic construct
  REGION 1..253: note = Synthetic
DELERLIHEVKLLIQRAEFLARQIRQLGDEEFAQEVEELVEQISRLLKRAIQEGDPELLELASLIAKVLLLILLALLMAKKIRQLGDEEFAQEVEELVEQISRLLKRAIQEGDPELLELASLIAKVLLLILLALLMAKKIRQLGDEEFAQEVEELVEQISRLLKRAIQEGDPELLELASLIAKVLLLILLALLMAKKIRQLGDEEFAQEVEELVEQISRLLKRAIQEGDPRLLLEAYIFALQLLLELELHLLS

SEQ ID NO: 710 - protein, 253 aa, synthetic construct
  REGION 1..253: note = Synthetic
SELERLINRVKELIIRAELLAEEIRQHGDEEFAQEVEELVEQISRLLKRAIQEGDPELLELASLIAKVLLLILLALLMAKKIRELGDEEFAQEVEELVEQISRLLKRAIQEGDPELLELASLIAKVLLLILLALLMAKKIRQLGDEEFAQEVEELVEQISRLLKRAIQEGDPELLELASLIAKVLLLILLALLMAKKIRQLGDEEFAQEVEELVEQISRLLKRAIQEGDPRLLLRAYYLAVKLLLDLEFALLS

SEQ ID NO: 711 - protein, 253 aa, synthetic construct
  REGION 1..253: note = Synthetic
DELRELISEVESLIFEAELLARLIREQGDEEFAQEVEELVEQISRLLKRAIQEGDPELLELASLIAKVLLLILRALLMALKIRRLGDEEFAQEVEELVEQISRLLKRAIQEGDPELLELASLIAKVLLLILLALLMAKKIRQLGDEEFAQEVEELVEQISRLLKRAIQEGDPHLLRLASEIAKVLLLILLALLMAKKIRQLGDEEFAQEVEELVEQISRLLKRAIQEGDPRLLLEAYLFALRLLTELRRLLEA

SEQ ID NO: 712 - protein, 222 aa, synthetic construct
  REGION 1..222: note = Synthetic
DELERLLLEALLLLQKIKELVQEAGQPEFLKTAQELREQLKRAMEEGDEEKLRLLLLLVEAIYLLALIILLVQEAGQPEFLKTAQELLEQLKRAMEEGDEEKLRLLLLLVEAIYLLALIILLVQEAGQPEFLKTAQELLEQLKRAMEEGDEEKLRLLLLLVEAIYLLALIILLVQEAGQPEFLKTAQELLEQLKRAMEEGDEELLRRLLRRVRAIFLEAESL

SEQ ID NO: 713 - protein, 250 aa, synthetic construct
  REGION 1..250: note = Synthetic
DELELKIEQLIFTVHILALLIQLNGDYEQAQQLRELVQRLLELLKKATETGDPRLVEWALLLLRILLLIALVLLMALEIQKEGDYEQAQQLRELVQRLLELLKKATETGDPRLVEWALLLLRILLLIALVLIMALEIQKEGDYEQAQQLRELVQRLLELLKKATETGDPRLVEWALELLEILLLIALVLIMALEIQKEGDYEQAQQLRELVQRLLELLKKATETGDPRLVHKAYLLLVELLERARELIRS

SEQ ID NO: 714 - protein, 250 aa, synthetic construct
  REGION 1..250: note = Synthetic
SELEVHIEELINKVRNLAQRIQLNGDYEQAQQLRELVQRLLELLKKATETGDPRLVEWALLLLRILLLIALVLIMALEIQKEGDYEQAQQLRELVQRLLELLKKATETGDPRLVEWALLLLRILLLIALVLIMALEIQKEGDYEQAQQLRELVQRLLELLKKATETGDPRLVEWALLLLRILLLIALVLIMALEIQKEGDYEQAQQLRELVQRLLELLKKATETGDPRLVEWAFKLLLHLLLRAQELLIS

SEQ ID NO: 715 - protein, 250 aa, synthetic construct
  REGION 1..250: note = Synthetic
DELEIEIHFLILVVHILAILIQLNGDYEQAQQLRELVQRLLELLKKATETGDPRLVEWALLLLRILLLIALVLTMALRIQREGDYEQAQQLRELVQRLLELLKKATETGDPRLVEWALLLLRILLLIALVLIMALEIQKEGDYEQAQQLRELVQRLLELLKKATETGDPRLVEWALLLLRILLLIALVLIMALEIQKEGDYEQAQQLRELVQRLLELLKKATETGDPELVFKAYRLLLELLTRAEYLIRS

SEQ ID NO: 716 - protein, 250 aa, synthetic construct
  REGION 1..250: note = Synthetic
DDELIKIELLIFIVHLLAELIQSNGDYEQAQQLRELVQRLLELLKKATETGDPRLVEWALLLLRILLLIALVLYMALEIQKEGDYEQAQQLRELVQRLLELLKKATETGDPRLVEWALLLLRILLLIALVLIMALEIQKEGDYEQAQQLRELVQRLLELLKKATETGDPELVRWALELLRILLLIALVLIMALEIQKEGDYEQAQQLRELVQRLLELLKKATETGDPRLVEKAYLLLLRLLRIAERLIKA

SEQ ID NO: 717 - protein, 225 aa, synthetic construct
  REGION 1..225: note = Synthetic
SEVERLVVEAHLLAIRIEHIARLLGDEEIFESAREIMEEVLRALQAGDLKTVQIVLLVAQAIYYAALILEIAKRLGDEEIFESAREIMEEVLRALQAGDLKTVQIVLLVAQAIYYAALILQIAKELGDEEIFESAREIMEEVLRALQAGDLKTVQIVLLVAQAIYFAALILQIAKELGDEEIFESAREIMEEVLRALQAGDLRTVQRVLNLAQRLFVEARNRKDE

SEQ ID NO: 718 - protein, 225 aa, synthetic construct
  REGION 1..225: note = Synthetic
DEVERLVIEALTHAFHIHLIAEHLGDEEIFESAREIMEEVLRALQAGDLKTVQIVLLVAQAIFYAARILFIAIVLGDEEIFESAREIMEEVLRALQAGDLKTVQIVLLVAQAIYYAALILEIAKKLGDEEIFESAREIMEEVLRALQAGDRRTVYIVLLVAQAIYYAALILQIAKELGDEEIFESAREIMEEVLRALQAGDTETVIEVLVLAIRTYHQARLIQES

SEQ ID NO: 719 - protein, 219 aa, synthetic construct
  REGION 1..219: note = Synthetic
DELELRAELLLVELKRWIREAGDEELRENWQRLREILKRAQKQGDPEQIEEVMKQAKALILLAELLQWIREAGDEELRENWQRLLEILKRAQKQGDPEQIEEVMKQAKALILLAELLQWIREAGDEELRENWQRLLEILKRAQKQGDPEQIEEVMKQAKALILLAELLQWIREAGDEELRENWQRLLEILKRAQKQGDPLQIEHVIRQAQLLILHARRL

SEQ ID NO: 720 - protein, 219 aa, synthetic construct
  REGION 1..219: note = Synthetic
DELLTEIQLIILRLRRIAQELGDEENLQIVRELRERLKRISEAGDFEKAQALLLLVQIMLIILLLYKIAQELGDEENLQIVRELRERLKRISEAGDFEKAQALLLLVQIMLIILLLYKIAQELGDEENLQIVRELRERLKRISEAGDFEKAQALLLLVQIMLIILLLYKIAQELGDEENLQIVRELRERLKRISEAGDFEKAEKLLLLVRSMLLELRVS

SEQ ID NO: 721 - protein, 210 aa, synthetic construct
  REGION 1..210: note = Synthetic
DKELLQLLVHILRLLEEAKIAGVDEELFQEIRKLLERAREAAENGDPEKVRLLTLLAQILFLLAQAKIAGVDEELFQEIRKLMERAKEAAENGDPEKVRLLTLLAQILFLLAQAKIAGVDEELFQEIRKLMERAKEAAENGDPEKVRLLTLLAQILFLLAQAKIAGVDERFFQFIRELMETAKEAAENGDPRTVKSLTKLALATFEVAQT

SEQ ID NO: 722 - protein, 248 aa, synthetic construct
  REGION 1..248: note = Synthetic
DEILHLALQAEYFLHLVEHIMKKLAKEDPETFELLKEIVQLILELLIQALRTGDKETAEIASLAASAAYYLALVSVLMKKLAKEDPETFELLKEIVQLILELLIQALRTGDKETAEIASLAASAAFYLAQVSVLMKKLAKEDPETFELLKEIVQLILELLIQALRTGDKETAEIASLAASAAFFLAQVSVLMKKLAKEDPEIFEELKELVQLILELLIQALRTGDLRTAFKAYILAIVAFLLAELSVS

SEQ ID NO: 723 - protein, 222 aa, synthetic construct
  REGION 1..222: note = Synthetic
DELEKLLTHAQSLLLEIRYLVREAGQPEFLKTAQELLEQLKRAMEEGDEEKLRLLLLLVEAIYLLALIILLVQEAGQPEFLKTAQELLEQLKRAMEEGDEEKLRLLLLLVEAIYLLALIILLVQEAGQPEFLKTAQELLEQLKRAMEEGDEEKLRLLLLLVEAIYLLALIILLVQEAGQPEFLKTAQELLEQLKRAMEEGDERKLEELLVRVREIFERARLI

SEQ ID NO: 724 - protein, 248 aa, synthetic construct
  REGION 1..248: note = Synthetic
NYIEVYALLALLLLNAVELFMRLLAKEDPETFELLKEIVQLILELLIQALRTGDQETALIASLAASAAVHLAYVSLLMQNLAKEDPETFELLKEIVQLILELLIQALRTGDIRIALIASLAASAAAFLAAVSLLMQYLAKEDPETFELLKEIVQLILELLIQALRTGDLRTALIAYLAASAAFYLALVSHYMKRLAKEDPETFELLKEIVQLILELLIQALRTGDLETALRAYLLALYAFWLALESIA

SEQ ID NO: 725 - protein, 248 aa, synthetic construct
  REGION 1..248: note = Synthetic
DEIASLAESAREFLLFVEDYMKLLAKEDPETFELLKEIVQLILELLIQALRTGDKETAEIASLAASAAYYLALVSVRMKRLAKEDPETFELLKEIVQLILELLIQALRTGDKETARIASLAASAAFYLAQVSVLMKKLAKEDPETFELLKEIVQLILELLIQALRTGDEETAHIASLAASAAFYLAQVSVLMKKLAKEDPETFELLKEIVQLILELLIQALRTGDKETAIEAYLLAIRAFLLAELTVS

SEQ ID NO: 726 - protein, 231 aa, synthetic construct
  REGION 1..231: note = Synthetic
EERELQILLFKIEVLARHLQELAKQHGDEELFEILQRLIREVKESVEKAGTSEEAFLTIQMAEITILALELQLLAKQHGDEELFEILQRLIREVKESVEKAGTSEEAFLTIQMAEITILALELQLLAKQHGDEELFEILQRLIREVKESVEKAGTSEEAFLTILMAEITILALELQLLAKQHGDEELFEILQRLIREVKESVEKAGTSREAFETIIHAYIVILRLHLQLES

SEQ ID NO: 727 - protein, 226 aa, synthetic construct
  REGION 1..226: note = Synthetic
SHEEVLLEIYTAILLFQRLFRVAERLGDKELAEKIRQLTEQLEEIFERVRKSGDEETLRLALVLAQIAQAIVEFLYMYSVAERLGDKELAEKIRQLTEQLEEIFERVKKSGDEETLRLALVLAQIAQAIVEFLYMYSVAERLGDKELAEKIRQLTEQLEEIFERVKKSGDEETLRLALVLAQIAQKIVELLYRYSVAERLGDKQLAEAIRIETESLEERFERVKKS

SEQ ID NO: 728 - protein, 256 aa, synthetic construct
  REGION 1..256: note = Synthetic
DEEQEIHAKILQILVFISRLARELKKEGDEEAVRWLLEMYQEIEELLRQAKQANDPEQYRLALLFVKILLILAEIFQRASELKKEGDEEAVRWLLEMLQEILELLRQAKQANDPEQYRLALLFVKILLILAEIFQRASELKKEGDEEAVRWLLEMLQEILELLRQAKQANDPEQYRLALLFVKILLILAEIFQRASELKKEGDEEAVRWLLEMLQEILELLRQAKQANDPEQYRRALHHVEILLELARNFQYRSEH

SEQ ID NO: 729 - protein, 256 aa, synthetic construct
  REGION 1..256: note = Synthetic
DRELKLYLLIRFILEYIRFQAERLKKEGDEEAVRWLLEMLQEILELLRQAKQANDPEQYRLALLFVKILLILAEIFLRASELKKEGDEEAVRWLLEMLQEILELLRQAKQANDPEQYRLALLFVKILLILAEIFQRASELKKEGDEEAVRWLLEMLQEILELLRQAKQANDPEQYRLALLFVKILLILAEIFQRASELKKEGDEEAVRWLLEMLQEILELLRQAKQANDPEQYQQALFHVEFLLVLAEEFQRASEL

SEQ ID NO: 730 - protein, 256 aa, synthetic construct
  REGION 1..256: note = Synthetic
DRETELYILILKILVEIRVLAETLKREGDEEAVRWLLEMLQEILELLRQARQANDPEQYRLALLFVKILLILAEIFQRASELKKEGDEEAVRWLLEMLQEILELLRQAKQANDPEQYRLALLFVKILLILAEIFQRASELKKEGDEEAVRWLLEMLQEILELLRQAKQANDPEQYRLALLFVKILLILAEIFQRASELKKEGDEEAVRWLLEMLQEILELLRQAKQANDPKQYRRALNIVEFLLNEARLFQEESES

SEQ ID NO: 731 - protein, 256 aa, synthetic construct
  REGION 1..256: note = Synthetic
SEEDELQEQVLRVIQEAERIIEIARQEGDPELIKRVEEIFEKARQLLEEAIKASSKEQIKNLMLLAQVLLVLIFAIEIIIIARQEGDPELIKRVEEIFEKARQLTEEAMKASSKEQIKNLMLLAQVLLVLIFAIEIIIIARQEGDPELIKRVEEIFEKARQLTEEAMKASSKEQIKNLMLLAQVLLVLIFAIEIIIIARQEGDPHLIKTVEEIFEKARQLTEEAMKASSKEQIKNLMLLAQHLLRQIEVIERFIRL

SEQ ID NO: 732 - protein, 256 aa, synthetic construct
  REGION 1..256: note = Synthetic
DEEEELLTLVSHVLIRAYIIIRIARQEGDPELIKRVEEIFEKARQLEEEARKASSKEQIKNLMLLAQVLLVLIFAIEIIIIARQEGDPELIKRVEEIFEKARQLTEEAMKASSKEQIKNLMLLAQVLLVLIFAIEIIIIARQEGDPELIKRVEEIFEKARQLTEEAMKASSKEQIKNLMLLAQVLLVLIFAIEIIIIARQEGDPELIKRVEEIFEKARQLTEEAMKASSKEQIRHLVQLALELLFRIEQIRKEIEA

SEQ ID NO: 733 - protein, 256 aa, synthetic construct
  REGION 1..256: note = Synthetic
SEEFELLLHVLRVLRFAVEIIKIARQEGDPELIKRVEEIFEKARQLTEEALKASSKEQIKNLMLLAQVLLVLIFAIEIIIIARQEGDPELIKRVEEIFEKARQLTEEAMKASSKEQIKNLMLLAQVLLVLIFAIEIIIIARQEGDPELIKRVEEIFEKARQLTEEAMKASSKEQIKNLMLLAQVLLVLIFAIEIIIIARQEGDPELIKRVEEIFEKARQLTEEAMKASSKEQIEKLVELAELLLDQIKYIEKRIRS

SEQ ID NO: 734 - protein, 222 aa, synthetic construct
  REGION 1..222: note = Synthetic
DEIELIAHQAENLILRVRHLAKRTGDPEAFRSAKELIEQLREMSQQGNEEEVRILFLAVSALYYILLVLLLAQKTGDPEAFRSAKELIEQLREMSQQGNEEEVRILFLAVSALYYILLVLLLAQKTGDPEAFRSAKELIEQLREMSQQGNEEEVRILFLAVSALYYILLVLLLAQKTGDPEAFRSAKELIEQLREMSQQGNEEEVRKILIEVRILYLELRLS

SEQ ID NO: 735 - protein, 256 aa, synthetic construct
  REGION 1..256: note = Synthetic
SEEEELLRQVLYVLSEALLIILLARREGDPELIKRVEEIFEKARQLVEEALKASSKEQIKNLMLLAQVLLVLIFAIRIIIIARQEGDPELIKRVEEIFEKARQLTEEAMKASSKEQIKNLMLLAQVLLVLIFAIEIIIIARQEGDPELIKRVEEIFEKARQLTEEAMKASSKEQIKNLMLLAQVLLVLIFAIEIIIIARQEGDPELIKRVEEIFEKARQLTEEAMKASSKEQIENLVREAEHLLNQILVIEHYIRS

SEQ ID NO: 736 - protein, 256 aa, synthetic construct
  REGION 1..256: note = Synthetic
DELEELLELVALVLANANYIIRLARQEGDPELIKRVEEIFEKARQLTEEALKASSKEQIKNLMLLAQVLLVLIFAIRIIIIARQEGDPELIKRVEEIFEKARQLTEEAMKASSKEQIKNLMLLAQVLLVLIFAIEIIIIARQEGDPELIKRVEEIFEKARQLTEEAMKASSKEQIKNLMLLAQVLLVLIFAIEIIIIARQEGDPELIKRVEEIFEKARQLTEEAMKASSKEQIRELVLLALELLYQIEVIERYIRS

SEQ ID NO: 737 - protein, 268 aa, synthetic construct
  REGION 1..268: note = Synthetic
DELTELLRLALEAHLNALRVLQQAQQAGDPELIRRAKEILEKAHELIRQLLEMVHQGDLEKAKLISLVVVAIIAYIFALEVLIQAQQAGDPELIRRAKEILEKAEELIEQLIEMTRQGDLEKAKLISLVVVAIIAYIFALEVLIQAQQAGDPELIRRAKEILEKAEELIEQLIEMTRQGDLEKAKLISLVVVAIIAYIFALEVLIQAQQAGDPELIRRAKEILEKAEELIEQLIEMTRQGDLEKAKKISHKVREIIQLIKQLEEQIQS

SEQ ID NO: 738 - protein, 268 aa, synthetic construct
  REGION 1..268: note = Synthetic
SELDRLFYFAVHALYLAAEVLELAKKAGDPELIRRAKEIREKAEELVEQLHEMVRQGDLEKAKLISLVVVAIIAYIFALEVLIQAQQAGDPELIRRAKEILEKAEELIEQLIEMTRQGDLEKAKLISLVVVAIIAYIFALEVLIQAQQAGDPELIRRAKEILEKAEELIEQLIEMTRQGDLEKAKLISLVVVAIIAYIFALEVLIQAQQAGDPELIRLAKEILELAEELIEQLIEMTRQGDLEKAKRISQLVEAIILLILALEILIRS

SEQ ID NO: 739 - protein, 268 aa, synthetic construct
  REGION 1..268: note = Synthetic
AKLESLLRVAFEAYILALYVLLLAREAGDPELIRRAKEILEKAEELIEQLYEMVKQGDLEKAKLISLVVVAIIAYIFALEVLIQAQQAGDPELIRRAKEILEKAEELIEQLIEMTRQGDLEKAKLISLVVVAIIAYIFALEVLIQAQQAGDPELIRRAKEILEKAEELIEQLIEMTRQGDLEKAKLISLVVVAIIAYIFALEVLIQAQQAGDPELIRRAKEILEKAEELIEQLIEMTRQGDLEKAKLISRLVEQIEILIRSLENLIKA

SEQ ID NO: 740 - protein, 245 aa, synthetic construct
  REGION 1..245: note = Synthetic
DEEFREFVKQAQELFHRALEANKKDPEKARILLELATLVALILHMTLRALETAQRLLELGRPEVFETAREFIEQARELVQKALEAAAKDPKKALILIQLATLVLLILLMTLRALETAQRLLELGRPEVFETAREFIEQARELVQKALEAAAKDPKKALILIQLATLVLLILLMTLRALETAQRLLELGRPEVFETAREFIEEARELVQKALEAAAKDPKKALRLIRRALEVLQLLLNILKRLEQS

SEQ ID NO: 741 - protein, 272 aa, synthetic construct
  REGION 1..272: note = Synthetic
SELEQLAVEATHIALKVFEIFKRIREAGGSEEIQKLIRELLQLAIELVREIVEALKRGDEEKLKMALLAVSAVLYAALVLLISLQIREAGGSEEIQKLIRELLQLAIELVREIVEALKRGDEEKLKMALLAVSAVLYAALVLLISLQIREAGGSEEIQKLIRELLQLAIELVREIVEALKRGDEEKLKMALLAVSAVLYAALVLLISLQIREAGGSEEIQKLIRELLQLAIELVREIVEALKRGDEEKLREALKEVEQVLLLARVLLIQLES

SEQ ID NO: 742 - protein, 272 aa, synthetic construct
  REGION 1..272: note = Synthetic
SELEQLASEARQYALYVELIFLEIRSHGGSEEIQKLIRELLQLAIELVREIVEALKRGDEEKLKMALLAVSAVLYAALVLLISLQIRVAGGSEEIQKLIRELLQLAIELVREIVEALKRGDEEKLKMALLAVSAVLYAALVLLISLQIREAGGSEEIQKLIRELLQLAIELVREIVEALKRGDEEKLKMALLAVSAVLYAALVLLISLQIREAGGSEEIQKLIRELLQLAIELVREIVEALKRGDEEKLKMALLAVRKVLLLAERLLIDLEL

SEQ ID NO: 743 - protein, 272 aa, synthetic construct
  REGION 1..272: note = Synthetic
SELLELALRAQRYAFEVELIHQFIRYAGGSEEIQKLIRELLQLAIELVREIQEALKRGDEEKLKMALLAVSAVLYAALVLYISLLIFLAGGSEEIQKLIRELLQLAIELVREIVEALKRGDEEKLKMALLAVSAVLYAALVLLISLQIRLAGGSEEIQKLIRELLQLAIELVREIVEALKRGDEEKLRMALIAVSAVLAAALVLLISLQIREAGGSEEIQKLIRELLQLAIELVREIVEALKRGDREKLLKALSLVLKVLLEAEVLLERLES

SEQ ID NO: 744 - protein, 272 aa, synthetic construct
  REGION 1..272: note = Synthetic
TELEFLAKLAKLYAEIVELIFEHIREAGGSEEIQKLIRELLQLAIELVREIVEALKRGDEHKLKAALLAVSAVLYAALVLYISLLIREAGGSEEIQKLIRELLQLAIELVREIVEALKRGDSHKLEMALLAVSAVLYAARVLLISLQIREAGGSEEIQKLIRELLQLAIELVREIVEALKRGDLEKLHLALIAVSAVLYAALVLLISLQIREAGGSEEIQKLIRELLQLAIELVREIVEALKRGDIEKLFQALLLVIEVLDRAERLLRSLEI

SEQ ID NO: 745 - protein, 222 aa, synthetic construct
  REGION 1..222: note = Synthetic
DEVETIANEALVLIRRVLLLAQKTGDPEAFRSAKELREQLREMSQQGNEEEVRILFLAVSALYYILLVLLLAQKTGDPEAFRSAKELIEQLREMSQQGNEEEVRILFLAVSALYYILLVLLLAQKTGDPEAFRSAKELIEQLREMSQQGNEEEVRILFLAVSALYYILLVLLLAQKTGDPEAFRSAKELIEQLREASQQGNELDVRRLLLLVLILYIELRRS

SEQ ID NO: 746 - protein, 272 aa, synthetic construct
  REGION 1..272: note = Synthetic
SELERLASRAHHIALLVESIFYHIRNLGGSEEIQKLIRELLQLAIELVREIQEALKRGDEEKLKMALLAVSAVLYAALVLLISLEIRVAGGSEEIQKLIRELLQLAIELVREIVEALKRGDEEKLKMALLAVSAVLYAALVLLISLQIREAGGSEEIQKLIRELLQLAIELVREIVEALKRGDEEKLKMALLAVSAVLYAALVLLISLQIREAGGSEEIQKLIRELLQLAIELVREIVEALKRGDEEKLRRALTLVAEVLLLALSLLLRLEL

SEQ ID NO: 747 - protein, 269 aa, synthetic construct
  REGION 1..269: note = Synthetic
SEELEMLRIILRALEIANEVEELVRKTGDMEAAERVIEIARQLEEFAKRTLNATDEEESRQLKEHLEMLFIILQAILIAVKVLKLVQKTGDMEAAERVIEIARQLEEFAKRTLNATDEEESRQLKEHLEMLFIILQAILIAVKVLKLVQKTGDMEAAERVIEIARQLEEFAKRTLNATDEEESRQLKEHLEMLFIILQAILIAVKVLKLVQKTGDMEAAERVIEIARQLEEFAKRTLNATDEEESRQLKEHLERLFFLLLYILLYVEHL

SEQ ID NO: 748 - protein, 272 aa, synthetic construct
  REGION 1..272: note = Synthetic
DQETIALELRQIATHAVIILLRVEKKATSPEQKQMARELIQEVEELAKEVIRLLKEGDEEKFRQYKQALELLLIAAVAALLLMDVSLKATSPEQKQMARELIQEVIELAKEVIRLLKEGDEEKFRQYKQALELLLIAAVAALLLMDVSLKATSPEQKQMARELIQEVIELAKEVIRLLKEGDEEKFRQYKEALELLLLAAVAALLLMDVSLKATSPEQKQMARELIQEVIELAKEVIRLLKEGDEEKFRQYQERLYKLLVLAELLLRRMDRS

SEQ ID NO: 749 - protein, 269 aa, synthetic construct
  REGION 1..269: note = Synthetic
DKQRRELQEIALKIVFIAHLVLLEATSPEESERLKRILRQAEEIVQQVREATKEGDKEKFEILKQILELLLIAAEIALLAMRVLQQATSPEESERLKRILRQALEIVQQVLEATKEGDKEKFEILKQILELLLIAAEIALLAMEVLQQATSPEESERLKRILRQALEIVQQVLEATKEGDKEKFEILKQILELLLLAAEIALLAMEVLQQATSPEESERLKRILRQALEIVQQVLEATKEGDKEKFEILHRILNQLYLLALRHLTEFRL

SEQ ID NO: 750 - protein, 299 aa, synthetic construct
  REGION 1..299: note = Synthetic
DTLERIEQIRYLIEYLLLRIRELVREIIKSGSEEVEEVKRLLEEIKRLTEEFQQRTRELEKQGDLESALTLALIALITALIFLMLLQILKLVVEIIQSGSEEVEEVKRLLEEIKRLTEEFQQRTRELEKQGDLESALTLALIALITALIFLMLLQILKLVVEIIQSGSEEVEEVKRLLEEIKRLTEEFQQRTRELEKQGDLESALTLALIALITALIFLMLLQILKLVVEIIQSGSEEVEEVKRLLEEIKRYTEEFQQRTREYEKQGDLEYAFELARIALLYALIFLLRLRLLKRHVES

SEQ ID NO: 751 - protein, 272 aa, synthetic construct
  REGION 1..272: note = Synthetic
DELERIAQEVRYILERAKHILREVFRLVTSPETQELIRKFKEMLELVLELLKEATQRGDERLFRLALIAARVILLLALALLILIQVFKLVTSPETQELIRKFKEMLELVLELLKEATQRGDERLFRLALIAARVILLLALALLILIQVFKLVTSPETQELIRKFKEMLELVLELLKEATQRGDERLFRLALIAARVILLLALALLILIQVFKLVTSPETQELIRKFKEMLELVLELLKEATQRGDERLFREALRLAEEILLRALLLLLRIRH

SEQ ID NO: 752 - protein, 272 aa, synthetic construct
  REGION 1..272: note = Synthetic
DELEQIAVQVRAILHQALSVLIQVKLLVTSPETQELIRKFKEMLELVLELLKEATQRGDERLFRLALIAARVILLLALALLILIQVFKLVTSPETQELIRKFKEMLELVLELLKEATQRGDERLFRLALIAARVILLLALALLILIQVFKLVTSPETQELIRKFKEMLELVLELLKEATQRGDERLFRLALIAARVILLLALALLILIQVFKLVTSPETQELIRKFKEMLELVLELLKEATQRGDERLFRLALIAARVILHRARALLFELEL

SEQ ID NO: 753 - protein, 272 aa, synthetic construct
  REGION 1..272: note = Synthetic
SELERIAQEVRDLLERARVILEKVHEEVTSPETQELIRKFKEMLELVLELLKEATQRGDERLFRLALIAARVILLLALALLILIQVFKLVTSPETQELIRKFKEMLELVLELLKEATQRGDERLFRLALIAARVILLLALALLILIQVFKLVTSPETQELIRKFKEMLELVLELLKEATQRGDERLFRLALIAARVILLLALALLILIQVFKLVTSPETQELIRKFKEMLELVLELLKEATQRGDERLFRQALLLARRILLRALHLLLEIEQ

SEQ ID NO: 754 - protein, 272 aa, synthetic construct
  REGION 1..272: note = Synthetic
SELEEIRLRVELILKLAKLFLEYVHHLVTSPETQELIRKFKEMLELVLELLKEATQRGDERLFRLALIAARVILLLALALVILIQVFLRVTSPETQELIRKFKEMLELVLELLKEATQRGDERLFRLALIAARVILLLALALLILIQVFKLVTSPETQELIRKFKEMLELVLELLKEATQRGDERLFRLALIAAKVILILALALLILIQVFKLVTSPETQELIRKFKEMLELVLELLKEATQRGDKKLFLKAYELALHILSEALRLLTQIES

SEQ ID NO: 755 - protein, 272 aa, synthetic construct
  REGION 1..272: note = Synthetic
DELEEIAFRVKLILELALFILEQVFRRVTSPETQELIRKFKEMLELVLELLKEATQRGDERLFRLALIAARVILLLALALLILIQVFKLVTSPETQELIRKFKEMLELVLELLKEATQRGDERLFRLALIAARVILLLALALLILIQVFKLVTSPETQELIRKFKEMLELVLELLKEATQRGDEHLFRLALIAAQVILILALALLILIQVFKLVTSPETQELIRKFKEMLELVLELLKEATQRGDFRLFYQALRLANQILVEARQLLHEIES

SEQ ID NO: 756 - protein, 214 aa, synthetic construct
  REGION 1..214: note = Synthetic
DEEEALINEISAIIYRILSIAKELGDPELEQTARELLRRVKEAGTDQEKLKILLIIAEILLIIALILRLAQELGDPELFQTAQELLRRVKEAGTDQEKLKILLIIAEILLIIALILRLAQELGDPELFQTAQELLRRVKEAGTDQEKLKILLIIAEILLIIALILRLAQELGDPELFQTAQELLRRVKEAGTDEEKLVRLLAEALELLLEARLL

SEQ ID NO: 757 - protein, 272 aa, synthetic construct
  REGION 1..272: note = Synthetic
SRLELIKQLVETLLRLAKVVLEEVFKLVTSPETQELIRKFKEMLELVLELLKEATQRGDERLFRLALIAARVILLLAEALLILIQVFKLVTSPETQELIRKFKEMLELVLELLKEATQRGDERLFRLALIAARVILLLALALLILIQVFKLVTSPETQELIRKFKEMLELVLELLKEATQRGDEKLFLLALIAARVILLLALALLILIQVFKLVTSPETQELIRKFKEMLELVLELLKEATQRGDSRLFVEALILAYEILTLARALLILIQV

SEQ ID NO: 758 - protein, 273 aa, synthetic construct
  REGION 1..273: note = Synthetic
DRIEHLFRRIELLSQELRYLVEELTKQFGNSPELQQEIKELLEIVRKALEMAQRALEENDEKQIRIAYLLVRIALLSALLLLLVLELTKLFGNSPELQQEIKELLEIVRKALEMAQRALEENDEKQIRIAYLLVRIALLSALLLKLVLELTKLFGNSPELQQEIKELLEIVRKALEMAQRALEENDEKQIRIAYLLVRIALLSALLLKLVLELTKLFGNSPELQQEIKELLEIVRKALELAQRALEENDERKIQRAYALVLLALILALLLKSE

SEQ ID NO: 759 - protein, 285 aa, synthetic construct
  REGION 1..285: note = Synthetic
DEIRLRLLRILLQAQDIVLHIEYTLERLRQIGVPEEDLEKIKEVAKKALELLKQAIELWAKDDERAEIAARLALMLVEAALIVAQILETLERLRQIGVPEEDLEKIKEVAKKALELLKQAIELWAKDDERAEIAARLALMLVEAALIVAQILETLERLRQIGVPEEDLEKIKEVAKKALELLKQAIELWAKDDERAEIAARLALMLVEAALIVAQILETLERLRQIGVPEEDLEKIKERAKRALEILKQAIELWAKDDERAERLARTALNLVRVALLLALILLLS

SEQ ID NO: 760 - protein, 285 aa, synthetic construct
  REGION 1..285: note = Synthetic
DEIRLRLKQLLLRALEIVNEIKHTLERLRQIGVPEEDLEKIKEVAKKALELLKQAIELWAKDDERAEIAARLALMLVEAALIVAQILETLERLRQIGVPEEDLEKIKEVAKKALELLKQAIELWAKDDERAEIAARLALMLVEAALIVAQILETLERLRQIGVPEEDLEKIKEVAKKALELLKQAIELWAKDDERAEIAARLALMLVEAALIVAQILETLERLRQIGVPEEDLEEIKRHAKEALELLKQAIELWAKDDERAEIAAREALRLVRAALQLAEYLLIQ

SEQ ID NO: 761 - protein, 285 aa, synthetic construct
  REGION 1..285: note = Synthetic
AEIAERLRHMLSEAESIVHEIRHVLEELRRIGVPEEDLEKIKEVAKKALELLKQAIELWAKDDERAEIAARLALMLVEAALIVAQILETLERLRQIGVPEEDLEKIKEVAKKALELLKQAIELWAKDDERAEIAARLALMLVEAALIVAQILETLERLRQIGVPEEDLEKIKEVAKKALELLKQAIELWAKDDERAEIAARLALNLVEAALIVAQILETLERLRQIGVPEEDLEKIKEVAKKALELLKQAIELWAKDDERAERAARRALLIVREALVRAELLLVS

SEQ ID NO: 762 - protein, 285 aa, synthetic construct
  REGION 1..285: note = Synthetic
DEIAHKLRQMLLEAQLIVSLIETLLEQLRKIGVPEEDLEKIKEVAKKALELLKQAIELWAKDDERAEIAARLALMLVEAALIVARILLILEQLRRLGVPEEDLEKIKEVAKKALELLKQAIELWAKDDERAEIAARLALMLVEAALIVAQILETLERLRKIGVPEEDLEKIKEVAKKALELLKQAIELWAKDDRRAYVAAVLALILVEAALIVAQILETLERLRQIGVPEEDLEKIKEVAKKALELLKQAIELWAKDLERALRAALQALLIVIEALLLARFLETS

SEQ ID NO: 763 - protein, 262 aa, synthetic construct
  REGION 1..262: note = Synthetic
DELEELLYEALRLLLLVEQILFRIVILWPQAQESFEEASQTAREIIEKVQRAVEEGDEEKIRLLILLLIALVLMAIVLLILTKIVQQWPQAQESFEEASQTAREIIEKVQRAVEEGDEEKIRLLILLLIALVLMAIVLLILTKIVQQWPQAQESFEEASQTAREIIEKVQRAVEEGDEEKIRLLILLLIALVLMAIVLLILTKIVQQWPQAQESFEEASQTAREIIEKVQRAVEEGDRRLILHLLVILFHLVLEARTELTHL

SEQ ID NO: 764 - protein, 262 aa, synthetic construct
  REGION 1..262: note = Synthetic
DELLHLLAEAIRLFYTVLEILHKIVQQWPQAQESFEEASQTAREIVEKVERAVEEGDEEKIRLLILLLIALVLMAIVLLILTKIVQQWPQAQESFEEASQTAREIIEKVQRAVEEGDEEKIRLLILLLIALVLMAIVLLILTKIVQQWPQAQESFEEASQTAREIIEKVQRAVEEGDEEKIRLLILLLIALVLMAIVLLILTKIVQQWPQAQESFEEASQTAREIIEKVQRAVEEGDERLIEILIILLRILVHIARYLLRKL

SEQ ID NO: 765 - protein, 262 aa, synthetic construct
  REGION 1..262: note = Synthetic
DRLERLLAEAYRLYYLVESILRYILVLWPQAQESFEEASQTAREILEKVERAVEEGDEEKIRLLILLLIALVLMAIVLYILTEIVRQWPQAQESFEEASQTAREIIEKVQRAVEEGDEEKIRLLILLLIALVLMAIVLLILTKIVQQWPQAQESFEEASQTAREIIEKVQRAVEEGDEEKIRLLILLLIALVLMAIVLLILTKIVQQWPQAQESFEEASQTAREIIEKVQRAVEEGDEQKILELLFLLYQLVLFARILLLRT

SEQ ID NO: 766 - protein, 262 aa, synthetic construct
  REGION 1..262: note = Synthetic
SELEKLLFKAKELRLRVESILLEIVNQWPQAQESFEEASQTAREIIEKVQRAVEEGDEEKIRLLILLLIALVLMAIVLLILTKIVQQWPQAQESFEEASQTAREIIEKVQRAVEEGDEEKIRLLILLLIALVLMAIVLLILTKIVQQWPQAQESFEEASQTAREIIEKVQRAVEEGDEEKIRLLILLLIALVLMAIVLLILTKIVQQWPQAQESFEEASQTAREIIEKVQRAVEEGDFEKIIRLISLLQTLVLEAELLLKRT

SEQ ID NO: 767 - protein, 214 aa, synthetic construct
  REGION 1..214: note = Synthetic
SEIENIIERIELIIQIIELIARRLGDPELFQTAQELLRRVKEAGTDQEKLKILLIIAEILLIIALILYTALQLGDPELFQTAQELLRRVKEAGTDEEKLRILLLIAEILLIIALILLLALELGDPELFQTAQELLRRVKEAGTDKRKLLILRLIALILLIIALILRLAQRLGDPELFQTAQELLRRVKEAGTDEEKLLELLSEAYRLLNRAHEL

SEQ ID NO: 768 - protein, 276 aa, synthetic construct
  REGION 1..276: note = Synthetic
DEERYLALEIELLVVRVKIILKRITQLDPDNPELREIIQRIRELAEELMKEAQKAVEEGDKETLRLIKLALEILTLVAIVIYILTLITQLDPDNPELREIIQRILELAEELMKEAQKAVEEGDKETLRLIKLALEILTLVAIVIYILTLITQLDPDNPELREIIQRILELAEELMKEAQKAVEEGDKETLRLIKLALEILTLVAIVIYILTLITQLDPDNPELREIIQRILELAEELMKEAQKAVEEGDEHTLREILLQLERLTKIAIVIYILTLI

SEQ ID NO: 769 - protein, 276 aa, synthetic construct
  REGION 1..276: note = Synthetic
DEEEHLALEINLLVLEVRRILRLITQLDPDNPELREIIQRILELAEELRKEAQKAVEEGDKETLRLIKLALEILTLVAIVIYILTLITQLDPDNPELREIIQRILELAEELMKEAQKAVEEGDKETLRLIKLALEILTLVAIVIYILTLITQLDPDNPELREIIQRILELAEELMKEAQKAVEEGDKETLRLIKLALEILTLVAIVIYILTLITQLDPDNPELREIIQRILELAEELMKEAQKAVEEGDHLTLLRILHILLELTDIAKQIYRETLI

SEQ ID NO: 770 - protein, 276 aa, synthetic construct
  REGION 1..276: note = Synthetic
SEEERLALEIQILVLIVRIFLLLIRHLDPDNPELREIIQRILELAEELMKEAQKAVEEGDKETLRLIKLALEILTLVAIVIYILTLITQLDPDNPELREIIQRILELAEELMKEAQKAVEEGDKETLRLIKLALEILTLVAIVIYILTLITQLDPDNPELREIIQRILELAEELMKEAQKAVEEGDKETLRLIKLALEILTLVAIVIYILTLITQLDPDNPELREIIQRILELAEELMKEAQKAVEEGDHRTLYRILLILLHLTHEAIEIYILTLI

SEQ ID NO: 771 - protein, 273 aa, synthetic construct
  REGION 1..273: note = Synthetic
DEMELELLRLIVDALELVLRLERLDPDDPQLRELAKEIKETLQELERKFLEALERGDLEKLRLILMSAELLVLIALALLLVTLLIQLDPDDPQLRELAKEIIETLQELLRKFLEALERGDLEKLRLILMSAELLVLIALALLLVTLLIQLDPDDPQLRELAKEIIETLQELLRKFLEALERGDLEKLRLILMSAELLVLIALALLLVTLLIQLDPDDPQLRELAKEIIETLQELLRKFLEALERGDLEKLRRILEEARYLVKLAHLLLYRTEL

SEQ ID NO: 772 - protein, 250 aa, synthetic construct
  REGION 1..250: note = Synthetic
SEVEELLLEILLILLRVANLAEQLGDEEMREQVKELLQRAIELAQKLRETGDPRYKEMLEVLFLLARILYLLLLVAVLAKQLGDEEMIEQVKELIQRAIELAQKLRETGDPRYKEMLEVLFLLARILYLLLLVAVLAKQLGDEEMIEQVKELIQRAIELAQKLRETGDPRYKEMLEVLFLLARILYLLLLVAVLAKQLGDEEMIEQVKELIQRAIELAQKLRETGDPRYYKLLLRLLFEAKLRFEELRLD

SEQ ID NO: 773 - protein, 257 aa, synthetic construct
  REGION 1..257: note = Synthetic
DRRREIEVEIELIALRVHTNLKKLKQAGVDPEKLRQLEELIEEIRKLAREASESGDEQQLRMVLILAQIVLLAAEVLKNLWKLKQAGVDPEKLRQLEELIEEITKLAREASESGDEQQLRMVLILAQIVLLAAEVLKNLWKLKQAGVDPEKLRQLEELIEEITKLAREASESGDEQQLRMVLILAQIVLLAAEVLKNLWKLKQAGVDPEKLRQLEELIEEITKLAREASESGDERELKHVLALALLVLTRAEQLKVS

SEQ ID NO: 774 - protein, 257 aa, synthetic construct
  REGION 1..257: note = Synthetic
DRMERIENTIEEIASRVRHNLFELKRAGVDPEKLRQLEELIEEITKLAREASESGDEQQLRMVLILAQIVLLAAEVLKNLWKLKQAGVDPEKLRQLEELIEEITKLAREASESGDEQQLRMVLILAQIVLLAAEVLKNLWKLKQAGVDPEKLRQLEELIEEITKLAREASESGDEQQLRMVLILAQIVLLAAEVLKNLWKLKQAGVDPEKLRQLEELIEEITKLAREASESGDEQQLRKVFNLARIVLLLAEILRLS

SEQ ID NO: 775 - protein, 257 aa, synthetic construct
  REGION 1..257: note = Synthetic
DEMERIEFKIRSIALEVELNLFLLKRLGVDPEKLRQLEELIEEITKLAREASESGDEQQLRMVLILAQIVLLAAEVLKNLWKLKQAGVDPEKLRQLEELIEEITKLAREASESGDEQQLRMVLILAQIVLLAAEVLKNLWKLKQAGVDPEKLRQLEELIEEITKLAREASESGDEQQLRMVLILAQIVLLAAEVLKNLWKLKQAGVDPEKLRQLEELIEEITKLAREASESGDERELYHVLHLAYEVLLRAELLKDQ

SEQ ID NO: 776 - protein, 257 aa, synthetic construct
  REGION 1..257: note = Synthetic
DRIEEDEIRVLQLFLEAQLLIHKLKKMGVDEEKLRQVEEKFQEILEKLEEAARQGDEEQLRIAKDLMEVALQFLEALELIWKLKQMGVDEEKLRQVEEKFQEILEKLEEAARQGDEEQLRIAKDLMEVALQFLEALELIWKLKQMGVDEEKLRQVEEKFQEILEKLEEAARQGDEEQLRIAKDLMEVALQFLEALELIWKLKQMGVDEEKLRQVEEKFQEILEKLEEAARQGDEEQLHEAKLLMEEALRFLRLLEQS

SEQ ID NO: 777 - protein, 257 aa, synthetic construct
  REGION 1..257: note = Synthetic
SRIEKDEEEVRRLFLEAEFLIERLKEQGVDEEKLRQVEEKFQEILEKLEEAARQGDEEQLRIAKDLMEVALQFLEALELIWKLKEMGVDEEKLRQVEEKFQEILEKLEEAARQGDEEQLRIAKDLMEVALQFLEALELIWKLKQMGVDEEKLRQVEEKFQEILEKLEEAARQGDEEQLRIALDLMEVALQFLEALELIWKLKQMGVDEEKLRQVEEKFQEILEKLEEAARQGDQEQLTEALILMERALVTLKFLERN

SEQ ID NO: 778 - protein, 214 aa, synthetic construct
  REGION 1..214: note = Synthetic
SKIEEIIHRIEIIIKTIEDIARLLGDPELFQTAQELLRRVKEAGTDQEKLKILLIIAEILLIIALILELAQKLGDPELFQTAQELLRRVKEAGTDQEKLKILLIIAEILLIIALILRLAQELGDPELFQTAQELLRRVKEAGTDQEKLKILLIIAEILLIIALILRLAQELGDPELFQTAQELLRRVKEAGTDQEKLRELLEEALKLLARARTL

SEQ ID NO: 779 - protein, 257 aa, synthetic construct
  REGION 1..257: note = Synthetic
DEIEENHYEVLQILLEAEVVLRRLEEAGVDPESLREMKENLKRVSQLLREATERGDMKLLEIAQRFAQVILIIAQALLILWKLEEAGVDPESLREMKENLKRVSQLLREATERGDMKLLEIAQRFAQVILIIAQALLILWKLEEAGVDPESLREMKENLKRVSQLLREATERGDMKLLEIAQRFAQVILIIAQALLILWKLEEAGVDPESLREMKENLKRVSQLLREATERGDMQLLHRALLIAEEILHRARNLLES

SEQ ID NO: 780 - protein, 257 aa, synthetic construct
  REGION 1..257: note = Synthetic
DEIDERRLEVELIILEAEYILELLEKAGVDPESLREMKENLKRVSQLLREATERGDMKLLEIAQRFAQVILIIAQALLILWKLEEAGVDPESLREMKENLKRVSQLLREATERGDMKLLEIAQRFAQVILIIAQALLILWKLEEAGVDPESLREMKENLKRVSQLLREATERGDRELLEIAQIFAQVILIIAQALLILWKLEEAGVDPEKLREMKENLKRVSQLLREATERGDFELLNRALVEAQYILLVARYLLRQ

SEQ ID NO: 781 - protein, 269 aa, synthetic construct
  REGION 1..269: note = Synthetic
DELEHKAQQLFQIAERMILLVERLLTDPEIRQELQELSELAKRLLELAFEASQRGDEESIRLILLLIKAVILVLIALTMIALVKRLLTDPEIRQELQELSELAKRLLELAFEASQRGDEESIRLILLLIKAVILVLIALTMIALVKRLLTDPEIRQELQELSELAKRLLELAFEASQRGDEESIRLILLLIKAVILVLIALTMIALVKRLLTDPEIRQELQELSELAKRLLELAFEASQRGDEESIRKIILLIELVIRFLELLTDLARS

SEQ ID NO: 782 - protein, 269 aa, synthetic construct
  REGION 1..269: note = Synthetic
DELELRAEELVVLANRLILIVERLLTDPEIRQELQELSELAKRLLELAFEASQRGDEESIRLILLLIKAVILVLIALTMIALVKRLLTDPEIRQELQELSELAKRLLELAFEASQRGDEESIRLILLLIKAVILVLIALTMIALVKRLLTDPEIRQELQELSELAKRLLELAFEASQRGDEESIRLILLLIKAVILVLIALTMIALVKRLLTDPEIRQELQELSELAKRLLELAFEASQRGDERSIERILRLIRLVIYILELLTEDALS

SEQ ID NO: 783 - protein, 269 aa, synthetic construct
  REGION 1..269: note = Synthetic
DLLEEKAYRLFLFALEMIYEVERLLTDPEIRQELQELSELAKRLLELAFEASQRGDEESIRLILLLIKAVILVLIALTMIALVKRLLTDPEIRQELQELSELAKRLLELAFEASQRGDEESIRLILLLIKAVILVLIALTMIALVKRLLTDPEIRQELQELSELAKRLLELAFEASQRGDEESIRLILLLIKAVILVLIALTMIALVKRLLTDPRIRQRLQELSELAKRLLELAFEASQRGDEESIKEILTLIKIVILILIALTEYALS

SEQ ID NO: 784 - protein, 269 aa, synthetic construct
  REGION 1..269: note = Synthetic
IELLEKARELVALAHYLIVLVELLLTDPEIRQELQELSELAERLLELAHEASQRGDEESIRLILLLIKAVILVLIALTMIARVKELLTDPEIRQELQELSELAKRLLELAFEASQRGDEESIRLILLLIKAVILVLIALTMIALVKRLLTDPEIRQELQELSELAKRLLELAFEASQRGDEESIRLILLLIIAVILVLIALTMIALVKRLLTDPRIRQRLQELSELAKRLLELAFEASQRGDEESIKEILSLIFEVIYLLIVLTITAES

SEQ ID NO: 785 - protein, 268 aa, synthetic construct
  REGION 1..268: note = Synthetic
DLETILQHIESLVLLAEVLLRHLLELSTSPEIRELIKEAKESLKEVLELAKQALREGDEELLRLALLLVLIIYLVMQAMLLLEELLQRSTSPEIRELIKEAKESLKEVLELAKQALREGDEELLRLALLLVLIIFLVMQAMLLLEELLQRSTSPEIRELIKEAKESLKEVLELAKQALREGDEHLLRLALLLVLIIFLVMQAMLLLEELLQRSTSPEIRELIKEAKESLKEVLELAKQALREGDEELLLEALFLVLRIFLLMKQMLEL

SEQ ID NO: 786 - protein, 269 aa, synthetic construct
  REGION 1..269: note = Synthetic
DELLELLLRIFEIFLRIELILHKLRKLYTSPEIQEQVEQITRSAKRMLQKAIEAFEEGDKETVELALLLLKILLLFVKILEILQRLKETYTSPEIQEQVEQITRSAKRMLQKAIEAFEEGDKETVELALLLLKILLLFVKILEILQRLKETYTSPEIQEQVEQITRSAKRMLQKAIEAFEEGDKETVELALLLLKILLLFVKILEILQRLKETYTSPEIQEQVEQITRSAKRMLQKAIEAFEEGDKNLVELALSLLYYLLTFVEILLRS

SEQ ID NO: 787 - protein, 266 aa, synthetic construct
  REGION 1..266: note = Synthetic
DDLLRQVRHLYHQVRLLLERTLEDSTSEEVRERIEQILQALQKAMEHALRAFEEGDFETLRLALLLFQVLLLFIKVTIKLKETLEESTSEEVRERIEQILQALQKAMEHALRAFEEGDFETLRLALLLFLVLLLFIKVTEKLKKTLEESTSEEVRERIEQILQALQKAMEHALRAFEEGDFRTLKLALFLFLVLLLFIKVTEKLKRTLEESTSEEVRERIEQILQALQKAMEHALRAFEEGDLKTLSRALRIFLRLLSDIEVEELE

SEQ ID NO: 788 - protein, 260 aa, synthetic construct
  REGION 1..260: note = Synthetic
SRKEKEHLHLELILARILYLVALAYEAGLDPEVARLLLEQAHQLLEEMRKASEMGDEEKLRKIVETAKLLLILAQIVLLVALAKQAGLDPEVARLLLEQALQLLEEMRKASEMGDEEKLRKIVETAKLLLILAQIVLLVALAKQAGLDPEVARLLLEQALQLLEEMRKASEMGDEEKLRKIVETAKLLLILAQIVLLVALAKQAGLDPEVARLLLEQALQLLEEMRKASEMGDEEKLRKIVETAKRLLHEAYIFLHRARS

SEQ ID NO: 789 - protein, 221 aa, synthetic construct
  REGION 1..221: note = Synthetic
DELTLLLEFLVRLIEQFARRLGDPELQEQAERLFQKAVEVEQAGDEEKLRQLILTAILMTLVAIILHYAKELGDPELQEQAERLFQKAVEVEQAGDERKLRQLILTAILMTLVARILKYAKELGDPELQEQAERLFQKAVEVEQAGDEEKLRQLILTAILMTLVARILKYAKELGDPELQEQAERLFQKAVEVEQAGDEEKLLELLIRAEYTTRVARELKS

SEQ ID NO: 790 - protein, 260 aa, synthetic construct
  REGION 1..260: note = Synthetic
DRKEHEYLHLLYILYEIFELVALAKQAGLDPEVARLLLEQARQLLREMKKASEMGDEEKLRKIVETAKLLLILAQIVLLVALAKQAGLDPEVARLLLEQALQLLEEMRKASEMGDEEKLRKIVETAKLLLILAQIVLLVALAKQAGLDPEVARLLLEQALQLLEEMRKASEMGDEEKLRKIVETAKLLLILAQIVLLVALAKQAGLDPEVARLLLEQALQLLEEMRKASEMGDEEKLRKIVETAKKLLIEAKLVLLRARS

SEQ ID NO: 791 - protein, 260 aa, synthetic construct
  REGION 1..260: note = Synthetic
SRKEQEEEKLQYILFRIRLLVQEAKRAGLDPEVARLLLEQALQLLEEMRKASEMGDEEKLRKIVETAKLLLILAQIVLLVALAKQAGLDPEVARLLLEQALQLLEEMRKASEMGDEEKLRKIVETAKLLLILAQIVLLVALAKQAGLDPEVARLLLEQALQLLEEMRKASEMGDEEKLRKIVETAKLLLILAQIVLLVALAKQAGLDPEVARLLLEQALQLLEEMRKASEMGDEEKLEKIYELALRLLVEARIVLRRALS

SEQ ID NO: 792 - protein, 268 aa, synthetic construct
  REGION 1..268: note = Synthetic
DELEQLTLRMLEIAHEARRILKEALKAGDPELREFAQRILELLQELTEQVIEALRQGDEKKIRLLLQTVKMLLIAVQATYYLIEALKAGDPELREFAQRILELLQELTEQVIEALRQGDEKKIRLLLQTVKMLLIAVQATYYLIEALKAGDPELREFAQRILELLQELTEQVIEALRQGDEKKIRLLLQTVKMLLIAVQATYYLIEALKAGDPELREFAQRILELLQELTEQVIEALRQGDEEKIRRLLQLVKELLTKVRLVYEKVKL

SEQ ID NO: 793 - protein, 268 aa, synthetic construct
  REGION 1..268: note = Synthetic
DELELLLEEMELIAKSAELLLREALKAGDPELREFAQRILELLQELTEQVIEALRQGDEHKIRLLLQTVKMLLIAVRATYYLIEALKAGDPELREFAQRILELLQELTEQVIEALRQGDEEKIRLLLQTVKMLLIAVQATYYLIEALKAGDPELREFAQRILELLQELTEQVIEALRQGDEHKIQLLLLTVKMLLIAVQATYYLIEALKAGDPELREFAQRILELLQELTEQVIEALRQGDLRRILELLLLVERLLRAVEQTYKLIEA

SEQ ID NO: 794 - protein, 272 aa, synthetic construct
  REGION 1..272: note = Synthetic
DELERLLLHARILILRVELLVHLVRQLSTSPEMREQIREILEELRQILEKLKQALREGDKEKLELLLILLYALLLIAQVTYLVILVLQLSTSPEMREQIREILEELRQILEKLKQALREGDKEKLELLLILLYALLLIAQVTYLVILVLQLSTSPEMREQIREILEELRQILEKLKQALREGDKEKLELLLILLYALLLIAQVTYLVILVLQLSTSPEMREQIREILEELRQILEKLKQALREGDDEKLYQLLLRLLELLIQARKTYLVILV

SEQ ID NO: 795 - protein, 276 aa, synthetic construct
  REGION 1..276: note = Synthetic
DELELIFYEILRIIAEAFYIMIEVKRLNPDDEELRRVLQELMEQLQRLEEQAKEALERGDKETLKLILTLVKIILIIAEAILIMTEVLQRNPDDEELRRVLQELMEQLQRLLEQAKEALERGDKETLKLILTLVKIILIIAEAILIMTEVLQRNPDDEELRRVLQELMEQLQRLLEQAKEALERGDKETLKLILTLVKIILIIAEAILIMTEVLQRNPDDEELRRVLQELMEQLQRLLEQAKEALERGDKETLEEILTEVKRILVEARDILRKTEQ

SEQ ID NO: 796 - protein, 276 aa, synthetic construct
  REGION 1..276: note = Synthetic
DEEEHLLVEILLIIAEALKIMKEVLQRNPDDEELRRVLQELREQLRRLKEQAKEALERGDKETLKLILTLVKIILIIAEAILIMTEVLQRNPDDEELRRVLQELMEQLQRLLEQAKEALERGDKETLKLILTLVKIILIIAEAILIMTEVLQRNPDDEELRRVLQELMEQLQRLLEQAKEALERGDKETLKLILTLVKIILIIAEAILIMTEVLQRNPDDEELRRVLQELMEQLQRLLEQAKEALERGDKHTLRRILFLVREILLRARLILHETES

SEQ ID NO: 797 - protein, 276 aa, synthetic construct
  REGION 1..276: note = Synthetic
DELERLLLEIEIIILRAELIMYEVRLRNPDDEELRRVLQELMEQLQRLLEQAKEALERGDKETLKLILTLVKIILIIAEAILIMTEVLQRNPDDEELRRVLQELMEQLQRLLEQAKEALERGDKETLKLILTLVKIILIIAEAILIMTEVLQRNPDDEELRRVLQELMEQLQRLLEQAKEALERGDKETLKLILLLVKIILIIAEAILIMTEVLQRNPDDEELRRVLQELMEQLQRLLEQAKEALERGDEETLLQIYVEVTHILDQARVILRRTES

SEQ ID NO: 798 - protein, 272 aa, synthetic construct
  REGION 1..272: note = Synthetic
DKQELQVHKIFRFVLFARVIAEWLFEFLRTPEIREQVQLLLEVAKQILEEMRRAYEENDEETLKQLLQIAKILYFVAFALYIALFLFEFLRTPEIREQVQLLLEVAKQILEEMRRAFEENDEETLKQLLQIAKILYFVAFALYIALYLFEFLRTPEIREQVQLLLEVAKQILEEMRRAFEENDEETLKQLLQIAKILYFVAFALYIALYLFEFLRTPEIREQVQLLLEVAKQILEEMRRAFEENDEETLKQLLQIAHELYNHASQLHIELRR

SEQ ID NO: 799 - protein, 198 aa, synthetic construct
  REGION 1..198: note = Synthetic
SEREHLFQEVELAISLVELIMQRLKRTGDDESIELLKELVRILLELLKQAQELNDEELLERILLFARVLFAIAQVFLIMSKLKRTGDDESIELLKELVRILLELLKQAQELNDEELLERILLFARVLFAIAQVFLIMSKLKRTGDDESIELLKELVRILLELLKQAQELNDEELLRQILLIALKLYAEALRHLLESLS

SEQ ID NO: 800 - protein, 225 aa, synthetic construct
  REGION 1..225: note = Synthetic
LRQLHITRLVEELILEIKFFALILGDEEIWETAQRLHEEARQMKEMGDLEKLRQLLITALVIVLIARILYYALQLGDEEIWETAQRLLEEARQMKEMGDLEKLRQLLITALVIVLIARILKYAKELGDEEIWETAQRLLEEARQMKEMGDLEKLRLLLLTAQVIVTIARILKYAKELGDEEIWETAQRLLEEARQMKEMGDEEKLRRLYEIALRLVAHAQNLKQS

SEQ ID NO: 801 - protein, 234 aa, synthetic construct
  REGION 1..234: note = Synthetic
DELHLRASLLLLEVVRLAILLKKKAGDESAQEILEQAHRLAREVQHLSAEEIREQLQIAKAMYWLLLVVLLAILLKKKAGDESAQEILEQASRLAREVQHLSAEEIREQLQIAKAMYWLLLVVLLAILLKKKAGDESAQEILEQASRLAREVQHLSAEEIREQLQIAKAMYWLLLVVLLAILLKKKAGDESAQEILEQASRLAREVQHLSDKEIREQLIRAIYLFLQLELRLES

SEQ ID NO: 802 - protein, 265 aa, synthetic construct
  REGION 1..265: note = Synthetic
DLLEKRVVHMIAFVLYIAFLLRLIVSPEIQELAERLIELAEILYQLLKEVIEEGDLEKLKLLLLAARVLYMIAFVVYIALQLLEIVSPEIQELAERLIELAKILIQLLKEVLREGDLEKLKLLLLAARVLYMIAFVVYIALQLLLIVSPEIQELAERLIELAKILIQLLKEVLREGDLEKLKLLLLAARVLYMIAFVVYIALQLLLIVSPEIQELAERLIELAKILIQLLKEVLREGDLEKLKLLLLAARRLYLHAQEVYTRLEL

SEQ ID NO: 803 - protein, 265 aa, synthetic construct
  REGION 1..265: note = Synthetic
DEIRSEVLEMILFVELIAQRLRKIVSPEIQELAERLIELAKILIQLLKEVLREGDLEKLKLLLLAARVLYMIAFVVYIALQLLLIVSPEIQELAERLIELAKILIQLLKEVLREGDLEKLKLLLLAARVLYMIAFVVYIALQLLLIVSPEIQELAERLIELAKILIQLLKEVLREGDLEKLKLLLLAARVLYMIAFVVYIALQLLLIVSPEIQELAERLIELAKILIQLLKEVLREGDLEKLKHLLKLAIRLFLRAEEVLFHLRL

SEQ ID NO: 804 - protein, 198 aa, synthetic construct
  REGION 1..198: note = Synthetic
DELEEIRLEVELLVLFVRLIILLLRSSGDDESIELLKELAKLILETLKRAKQRGDKEELELALIIAQVMYYVAFVFLIISRLQKSGDDESIELLKELAKLILETLKRAKQRGDKEELELALIIAQVMYHVAFVFLIISRLQKSGDDESIELLKELAKLILETLKRAKQRGDKEELRKALELAQRMFALAVEFLHRSES

SEQ ID NO: 805 - protein, 253 aa, synthetic construct
  REGION 1..253: note = Synthetic
SEIRSKAEENLTRARVIARLIKERATSPLVEQIVREIMEAIREAEQRIKNVDEEELRQVLILAQALYYLASALLLALKIEEKATSPLVEQIVREIMEAIREAAQRIKNVDEEELRQVLILAQALYYLASALLLALKIEEKATSPLVEQIVREIMEAIREAAQRIKNVDEEELRQVLILAQALYYLASALLLALKIEEKATSPLVEQIVREIMEAIREAAQRIKNVDEEELRKVLYLAILLFLEALLLLTRLES

SEQ ID NO: 806 - protein, 253 aa, synthetic construct
  REGION 1..253: note = Synthetic
VLILRQARKYLLLAHYLATLIEDDATSPLVEQIVREIMEAIREAAQRIKNVDEEELRQVLILAQALYYLASALLLALKIEEKATSPLVEQIVREIMEAIREAAQRIKNVDEEELRQVLILAQALYYLASALLLALKIEEKATSPLVEQIVREIMEAIREAAQRIKNVDEEELRQVLILAQALYYLASALLLALKIEEKATSPLVEQIVREIMEAIREAAQRIKNVDEEELRQVLILAHKLFIEARVLLLRLES

SEQ ID NO: 807 - protein, 253 aa, synthetic construct
  REGION 1..253: note = Synthetic
DEIEVRALIFLLLAHYIARQIEKKATSPLVEQIVREIMEAIREAAQRIKNVDEEELRQVLILAQALYYLASALLLALKIEEKATSPLVEQIVREIMEAIREAAQRIKNVDEEELRQVLILAQALYYLASALLLALKIEEKATSPLVEQIVREIMEAIREAAQRIKNVDEEELRQVLILAQALYYLASALLLALKIEEKATSPLVEQIVREIMEAIREAAQRIKNVDEEELFEVLILAIKLYLEARNLLERLKR

SEQ ID NO: 808 - protein, 253 aa, synthetic construct
  REGION 1..253: note = Synthetic
DEIRERAEEYLRRAHLIARHIERKATSPLVEQIVREIMEAIREAAQRIKNVDEEELRQVLILAQALYYLASALLLALKIEEKATSPLVEQIVREIMEAIREAAQRIKNVDEEELRQVLILAQALYYLASALLLALKIEEKATSPLVEQIVREIMEAIREAAQRIKNVDEEELRQVLILAQALYYLASALLLALKIEEKATSPLVEQIVREIMEAIREAAQRIKNVDEKELFEVLLLAHRLANHARLLLLRLES

SEQ ID NO: 809 - protein, 272 aa, synthetic construct
  REGION 1..272: note = Synthetic
DEMEELAIEVRLLVLRAEQLVKRIQEKATSPEIEEVAKRVLQILREIAETILQALKRGDEELLRMALLAALVALLVAEALLLVTRIQEKATSPEIEEVAKRVLQILREIAETILQALKRGDEELLRMALLAALVALLVAEALLLVTRIQEKATSPEIEEVAKRVLQILREIAETILQALKRGDEELLRMALLAALVALLVAEALLLVTRIQEKATSPEIEETAKRVLQILREIAETILQALKRGDEHLLRHAEIEARYALNIARYLLLITES

SEQ ID NO: 810 - protein, 272 aa, synthetic construct
  REGION 1..272: note = Synthetic
DEMERLAFEVNILVHRARLLVLEIERKATSPEIEEVAKRVLQILREIAETILQALKRGDEELLRMALLAALVALLVAEALLLVTRIQEKATSPEIEEVAKRVLQILREIAETILQALKRGDEELLRMALLAALVALLVAEALLLVTRIQEKATSPEIEEVAKRVLQILREIAETILQALKRGDEELLRMALLAALVALLVAEALLLVTRIQEKATSPEIEEVAKRVLQILREIAETILQALKRGDEELLRHALLLAYVALLTALLLLFRTEL

SEQ ID NO: 811 - protein, 272 aa, synthetic construct
  REGION 1..272: note = Synthetic
DEMRHLALEVELLLLRAKLLVKRIQEKATSPEIEEVAKRVLQILREIAETILQALKRGDEELLRMALLAALVALLVAEALLLVTRIQEKATSPEIEEVAKRVLQILREIAETILQALKRGDEELLRMALLAALVALLVAEALLLVTRIQEKATSPEIEEVAKRVLQILREIAETILQALKRGDEELLRMALLAALVALLVAEALLLVTRIQEKATSPEIEEVAKRVLQILREIAETILQALKRGDEELLLEAVVLALEALNQARNLLFQTES

SEQ ID NO: 812 - protein, 203 aa, synthetic construct
  REGION 1..203: note = Synthetic
DYQRLRIEHLIRAIEDLARIAGDEEFIEQAKELFRRAQEMDREQLEKIWLIVSIIYLILLIILLAQEAGDEEFIEQAKELFRRAQEMDRRQLRHILLIVSIIYLILLIILLAKEAGDEEFIEQAKELFRRAQEMDFEQLFKILLIVSIIYLILLIIILAKEAGDEEFIEQAKELFRRAQEMDEEQLFKIYQEVLQIYFRLLRS

SEQ ID NO: 813 - protein, 272 aa, synthetic construct
  REGION 1..272: note = Synthetic
DRMERLAHEVRHLVLEAEELVKRIQEKATSPEIEEVAKRVLQILREIAETILQALKRGDEELLRMALLAALVALLVAEALLLVTRIQEKATSPEIEEVAKRVLQILREIAETILQALKRGDEELLRMALLAALVALLVAEALLLVTRIQEKATSPEIEEVAKRVLQILREIAETILQALKRGDEELLRMALLAALVALLVAEALLLVTRIQEKATSPEIEEEAKRVLQLLREIAETILQALKRGDEELLRKALHDAHVALNRARALLFETRS

SEQ ID NO: 814 - protein, 272 aa, synthetic construct
  REGION 1..272: note = Synthetic
DRMERLAVKVYRLLLHAEAIVYEIEVFATSPEIEEVAKRVLQILREIAETILQALKRGDEELLRMALLAALVALLVAEALLLVTRIQEKATSPEIEEVAKRVLQILREIAETILQALKRGDEELLRMALLAALVALLVAEALLLVTRIQEKATSPEIEEVAKRVLQILREIAETILQALKRGDEELLRMALLAALVALLVAEALLLVTRIQEKATSPEIEEVAKRVLQILREIAETILQALKRGDEELLRQAYFNALRALLIALHLLTRTRQ

SEQ ID NO: 815 - protein, 272 aa, synthetic construct
  REGION 1..272: note = Synthetic
DRMEELARLVKELVQRALNLVKEIQERATSPEIEEVAKRVLQILREIAETILQALKRGDEELLRMALLAALVALLVAEALLLVTRIQEKATSPEIEEVAKRVLQILREIAETILQALKRGDEELLRMALYAALVALLVAEALLLVTRIQEKATSPEIEEVAKRVLQILREIAETILQALKRGDRRLLYNAYLAALVALLVAEALLLVTRIQEKATSPEIEERAKRVLQILREIAETILQALKRGDTELLLRALAEAYFALFLAEFLLLETES

SEQ ID NO: 816 - protein, 269 aa, synthetic construct
  REGION 1..269: note = Synthetic
DELLEKAKLLVRLALDVLRAVRQNATDPEFQQMIEELIKSLQEVIEIARKALQAGDFELLKLVLLLALALLLVALALLILAEVRQNATDPEFQQMIEELIKSLQEVIEIARKALQAGDFKLLELVLLLALALLLVALALLILARVRRNATDPEFQQMIEELIKSLQEVIEIARKALQAGDDHLLLLVLLLALALLLVALALLILARVRRNATDPEFQQMIEELIKSLQEVIEIARKALQAGDDEKLFHVLVLAHRLLQVARRLLELARV

SEQ ID NO: 817 - protein, 293 aa, synthetic construct
  REGION 1..293: note = Synthetic
DEMEELAYEVDRLAAELREILHRVRQKATDPEFREIAQQLIKIAKELLEIALEALRLAFKDPEKAETLLRMVILAAIVAVLAALLLLILIEVKQKATDPEFREIAQQLIKIAKELLEIALEALRLAFKDPEKAETLLRMVILAAIVAVLAALLLLILIEVKQKATDPEFREIAQQLIKIAKELLEIALEALRLAFKDPEKAETLLRMVILAAIVAVLAALLLLILIEVKQKATDPEFREIAQQLIKIAKELLEIALEALRLAFKDPEKAETLLRMVVELARRAVLLAEFLLLS

SEQ ID NO: 818 - protein, 268 aa, synthetic construct
  REGION 1..268: note = Synthetic
SELEHLELEFRQISNEIQQYLFLLERSGNPEMKEQVRELLELLREITELFREAVQRGDEEKIELALLNAKFLLISARILVYLVQLKQSGNPEMKEQVRELLELLREITELFREAVQRGDEEKIELALLNAKFLLISARILVYLVQLKQSGNPEMKEQVRELLELLREITELFREAVQRGDEEKIELALLNAKFLLISARILVYLVQLKQSGNPEMKEQVRELLELLREITELFREAVQRGDEEKIELALLNAEKLLIQARALVLQVKS

SEQ ID NO: 819 - protein, 270 aa, synthetic construct
  REGION 1..270: note = Synthetic
DKLDERSIYLYILMYKAEIHLEFASRQATSPEVERLIEEAQELLRQALELIQKAKHVSEEQFKLLWLSAVLYVLMALALVFLAIASAQATSPEVERLIEEAQELLRQALELIQKAKHVSEEQFKLLWLSAVLYVLMALALVFLAIASAQATSPEVERLIEEAQELLRQALELIQKAKHVSEEQFKLLWLSAVLYVLMALALVFLALASAQATSPEVERLIEIAQELLRQALELIQKAKHVSEEQFKLLWEKALELVLLALTLVLLALRVA

SEQ ID NO: 820 - protein, 269 aa, synthetic construct
  REGION 1..269: note = Synthetic
DRMEQLASEARQVADEVRTLIKQIRQRVTDPKFRETIEKLQEIAETAIQTVWEAIKRGDLEKARMALLAVRAVLIALEVLLLIWEIRQRVTDPKFRETIEKLQEIAETAIQTVWEAIKRGDLEKARMALLAVRAVLIALEVLLLIWEIRQRVTDPKFRETIEKLQEIAETAIQTVWEAIKRGDLEKARMALLAVRAVLIALEVLLLIWEIRQRVTDPKFRETIEKLQELAETAIQEVWEAIKRGDEQKAKAALALVEAVLTLLRRLLIS

SEQ ID NO: 821 - protein, 269 aa, synthetic construct
  REGION 1..269: note = Synthetic
DEEREIANRAHEVAIRVEHLIKEIRQRVTDPKFRETIEKLQEIAETAIQTVWEAIKRGDLEKARMALLAVRAVLIALEVLLLIWEIRQRVTDPKFRETIEKLQEIAETAIQTVWEAIKRGDLEKARMALLAVRAVLIALEVLLLIWEIRQRVTDPKFRETIEKLQEIAETAIQTVWEAIKRGDLEKARMALLAVRAVLIALEVLLLIWEIRQRVTDPQFREIIERLQELAEKAIQTVWEAIKRGDLEKAERALRIVENVLTALELLLLL

SEQ ID NO: 822 - protein, 230 aa, synthetic construct
  REGION 1..230: note = Synthetic
LELERRLLEVAAYLRIVMNKSLKLGDKETYQILRELSERAEKAIEEGDEEQVRLLLLLAKLILVAVELKETMQKSLELGDKETYQILRELSERALQAIKEGDEEQVRLLLLLAKLILVAVELKETMQKSLELGDKETYQILRELSERALQAIKEGDEEQVRLLLLLAKLILVAVELKETMQKSLELGDKYSYQILRELSERALQAIKEGDEHKVKLLLHLALSILEAHKN

SEQ ID NO: 823 - protein, 203 aa, synthetic construct
  REGION 1..203: note = Synthetic
DRLIREIELLIRLIELLARFAGDEEFIEQAKELFRRAQEMDEEQLQKIWLIVSIIYLILLIIFLAQQAGDEEFIEQAKELFRRAQEMDEEQLQKIWLIVSIIYLILLIIRLAKEAGDEEFIEQAKELFRRAQEMDEEQLRKIYLIVTIIYNILLIILLAKEAGDEEFIEQAKELFRRAQEMDEEQLLEILREVTEILFKLRSS

SEQ ID NO: 824 - protein, 230 aa, synthetic construct
  REGION 1..230: note = Synthetic
DRLERKLIVVALELDKTMRKSLELGDKETYQILRELSERAHQALQEGDEEQVRLLLLLAKLILVAVELKETMQKSLELGDKETYQILRELSERALQAIKEGDEEQVRLLLLLAKLILVAVELKETMQKSLELGDKETYQILRELSERALQAIKEGDEEQVRLLLLLAKLILVAVELKETMQKSLELGDETTYQILRELSERALQAIKEGDEFKVRYLILTALSILKLIES

SEQ ID NO: 825 - protein, 226 aa, synthetic construct
  REGION 1..226: note = Synthetic
DEVKELVLRIEFVIEVIKIHAHRAGMPEEIEEIVQQLLEMAKEARKAGDEELARIVLLVAQILLLIIKILIQARKAGMPEEIEEIVQQLLEMAKEASKAGDEELARIVLLVAQILLLIILILIQARKAGMPEEIEEIVQQLLEMAKEASKAGDEELARIVLLVAQILLLIILILIQARKAGMPEEIEEIVQQLLEMAKEASKAGDEELANKVLVTAEILLLKILKL

SEQ ID NO: 826 - protein, 225 aa, synthetic construct
  REGION 1..225: note = Synthetic
DEVEKLLTKILELLLYMELIFRLTGDPQLEELIQRALELFEEARKSGDPESVKLALLLALILYLLAFMVLIWKQTGDPQLEELIQRALELFEEARKSGDPESVKLALLLALILYLLAFMVLIWKQTGDPQLEELIQRALELFEEARKSGDPESVKLALLLALILYLLAFMVLIWKQTGDPQLEELIQRALELFEEARKSGDPKDVLRALYLALQLFLQAEFVLKS

SEQ ID NO: 827 - protein, 256 aa, synthetic construct
  REGION 1..256: note = Synthetic
SLIEKLKATAFRARAYLILIRAMGMDEEVVQEFLEILKEILREAVKASRAGMTEQIELMLLILELLFTAVRALLILVQIKAMGMDEEVVQEFLEILKEILREAVKASRAGMTEQIELMLLILELLFTAVRALYILVQIKAMGMDEEVVQEFLEILKEILREAVKASRAGMTEQIELMLLILELLFTAVRALYILVQIKAMGMDEEVVQEFLEILKEILREAVKASRAGMTRQIKEMLRLLQRLFQEVLELLHEVES

SEQ ID NO: 828 - protein, 234 aa, synthetic construct
  REGION 1..234: note = Synthetic
LDEVLQLILKAEFIALYIKIVGSPGAEETFQSVLELIRRVIEMALLGDPKEALKLAEVVLLILQAFFIALLIKQTGSPGAEETFQSVLELIRRVIEMALLGDPKEALKLAEVVLLILQAFYIALLIKQTGSPGAEETFQSVLELIRRVIEMALLGDPKEALKLARVVLLILQAFYIALLIKQTGSPGAEETFQSVLELIRRVIEMALLGDPHKASRLAHQVLYHLQLFLTELRL

SEQ ID NO: 829 - protein, 273 aa, synthetic construct
  REGION 1..273: note = Synthetic
DEEILLELYLLALRAFHLALQALLRYEKTGDPKAQELVKEALELILQVIKLLLETARQSTDEETHMRLLYLAAELAVQLAQLALQLYERTGDPKAQELVKEALELILQVIKLLLETARQSTDEETHMRLLYLAAELAVQLAQLALQLYERTGDPKAQELVKEALELILQVIKLLLETARQSTDEETHMRLLYLAAELAVQLAQLALQLYERTGDPKAQELVKEALELILQVIKLLLETARQSTDEETHKRLRLLAEYLRTLLEHLARQLYERT

SEQ ID NO: 830 - protein, 273 aa, synthetic construct
  REGION 1..273: note = Synthetic
DEQFLVRLYVEALEHFFQAQVALVRYERTGDPKAQELVKEALELILQVIKLLLETARQSTDEETHMRLLYLAAELAVQLAQLALQLYERTGDPKAQELVKEALELILQVIKLLLETARQSTDEETHMRLLYLAAELAVQLAQLALQLYERTGDPKAQELVKEALELILQVIKLLLETARQSTDEETHMRLLYLAAELAVQLAQLALQLYERTGDPKAQELVKEALELILQVIKLLLETARQSTDRETHRRLRHLAEKLELDLRLLAEQLYERT

SEQ ID NO: 831 - protein, 284 aa, synthetic construct
  REGION 1..284: note = Synthetic
DELERMLDEVRLLALLIELLLEYLLKIAKEDGDPQLKELIQIVLELAIQALRFAQEAVETGDMELVELALMLLLVAILAVRIAILLHKLLRIAKLDGDPQLKELIQIVLELAIQALRFAQEAVETGDMELVELALMLLLVAILAVRIALLLKELLRIAKLDGDPQLKELIQIVLELAIQALRFAQEAVETGDMHLVELALNLLLVAILAVRIALLLKELLRIAKLDGDPQLKELIQIVLELAIQALRFAQEAVETGDEHLVLRALLLLHHAEVLVREAQLRKES

SEQ ID NO: 832 - protein, 284 aa, synthetic construct
  REGION 1..284: note = Synthetic
DELEQLQHEVELLAQRIRVLLRELLKIAKLDGDPQLKELIQIVLELAIQALRFAQEAVETGDMELVELALMLLLVAILAVRIALLLKELLRIAKLDGDPQLKELIQIVLELAIQALRFAQEAVETGDMELVELALMLLLVAILAVRIALLLKELLRIAKLDGDPQLKELIQIVLELAIQALRFAQEAVETGDMELVELALMLLLVAILAVRIALLLKELLRIAKLDGDPQLKELIQIVLEIAIQALRIAQEAVETGDMELVRRAREFLEYALNLVRLALLRKSL

SEQ ID NO: 833 - protein, 273 aa, synthetic construct
  REGION 1..273: note = Synthetic
DELEQIARLVEILATFVRQLIRLVHETNSSDPKFRELVELAIELALLALRLLKEALETGDKKLAELALIALKVAIMALEVLLLIYRVFKQNSSDPKFRELVELAIELALLALRLLKEALETGDKKLAELALIALKVAYMALLVLLLIVRVFQQNSSDPKFRELVELAIELALLALRLLKEALETGDKKLAQLALIALKVAYMALLVLLLIVRVFQQNSSDPKFRELVELAIELALLALRLLKEALETGDLKLANEALIALLRAYVLLQELLEI

SEQ ID NO: 834 - protein, 203 aa, synthetic construct
  REGION 1..203: note = Synthetic
IELIRRIEKLIHEIIALAEHAGDEEFIEQAKELHRRAQEMDEEQLQKIWLIVSIIFLILLIIILAQEAGDEEFIEQAKELFRRAQEMDEEQLQKIWLIVSIIYLILLIILLAKEAGDEEFIEQAKELFRRAQEMDEEQLQKIWLIVSIIYYILLIILLAKEAGDEEFIEQAKELFRRAQEMDEEQLREILEEVLRIYIELLIL

SEQ ID NO: 835 - protein, 273 aa, synthetic construct
  REGION 1..273: note = Synthetic
DELEFIASEVKLLAHRVRELIKYVHKLNSSDPKFRELVELAIELALLALRLLKEALETGDKKLAELALIALKVAYMALLVLELIVRVFQQNSSDPKFRELVELAIELALLALRLLKEALETGDKKLAELALIALKVAYMALLVLLLIVRVFQQNSSDPKFRELVELAIELALLALRLLKEALETGDKHLAELALIALKVAYMALLVLLLIVRVFQQNSSDPKFRELVELAIELALLALRLLKEALETGDKKLALRAYLALVEALILLLELLLD

SEQ ID NO: 836 - protein, 234 aa, synthetic construct
  REGION 1..234: note = Synthetic
SEAERLLLELIQELLERIEESTDEEKIRKLRELIRLMLLIIYLSLLAEEAYQKAKQMGDKELLEAIQLLLELVLELIRRVYESTDEEKIRKLLELIILMLRIIILSVQATEAYQKAKQMGDKELLEAIQLLLELVLELIRRVYESTDEEKIRKLLELIILMLRIIILSVQATEAYQKAKQMGDKQLLHQIQELLELVLELIRRVYESTDEEKIRKLLEHIENVLNVIINLVRTS

SEQ ID NO: 837 - protein, 234 aa, synthetic construct
  REGION 1..234: note = Synthetic
DEAEKLLKELIEELERRIEESTDEEKQRKLQELIYLMLIILAYSFLARHAYRLAKKMGDKELLEAIQLLLELVLELIRRVYESTDEEKIRKLLELIILMLRIIVLSVQATEAYQKAKQMGDKELLEAIQLLLELVLELIRRVYESTDEEKIRKLLELIILMLRIIILSVQATEAYQKAKQMGDKELLEAIQLLLELVLELIRRVYESTDEKEIKLLLLQIILILLLIRLLVEQS

SEQ ID NO: 838 - protein, 234 aa, synthetic construct
  REGION 1..234: note = Synthetic
DEAERLLLELIEELIRRYEESTDREKQKKLLELIYLMITIILLSHRAREAYQKAKQMGDKELLEAIQLLLELVLELIRRVYESTDEEKIRKLLELIILMLRIIILSVQATEAYQKAKQMGDKELLEAIQLLLELVLELIRRVYESTDEEKIRKLLELIILMLRIIILSVQATEAYQKAKQMGDKELLERIQRILETVLELIRRVYESTDEEEIRRLLLVIITLLLLILNLVELS

SEQ ID NO: 839 - protein, 285 aa, synthetic construct
  REGION 1..285: note = Synthetic
DEQLLHVIKLVLDAALLAFEVLLNLRRLGDYQQTERIEELIQELFELLKELEELLRQGNEEEAKRLMQLIIVQALVLSAAALASEVLVSLKKLGDYQQTERIEELIQELFELLKELLELLRQGNEEEAKRLMQLIIVQALVLSAAALASEVLVSLKKLGDYQQTERIEELIQELFELLKELLELLRQGNEEEAKRLMQLIIVQALVLSAAALASEVLVSLKKLGDYQQTERIEELIQELFELLKELLELLRQGNEEEAKRLMQLIIVQARKLELEARLSELNIRS

SEQ ID NO: 840 - protein, 285 aa, synthetic construct
  REGION 1..285: note = Synthetic
DEQLLHVQRLVLHAAVEAILVLQLLKHLGDYQQTERIEELIQELFELLKELEELLRQGNEEEAKRLMQLIIVQALVLSAAALASYVLVSLKKLGDYQQTERIEELIQELFELLKELLELLRQGNEEEAKRLMQLIIVQALVLSAAALASEVLVSLKKLGDYQQTERIEELIQELFELLKELLELLRQGNEEEAKRLMQLIEVQAQVLSAAALASEVLVSLKKLGDYQQTERIEELIQELFELLKELLELLRQGNEEEAKRLMELIKKQAIRLYILALESELLIKS

SEQ ID NO: 841 - protein, 277 aa, synthetic construct
  REGION 1..277: note = Synthetic
DELLRILVLAYSAIFIVRFVLKILAAKDPEIAKQLQENAERLSELNRQLEELLRQGNEEEAKKFLELIRILILAVIAIALVLLVLKQLAAKDPEIAKQLQENAERLSELMRQLEELLRQGNEEEAKKFLRLIYILILAVIAIALVLLVLLRLAAKDPEIAKQLQENAERLSELMRQLEELLRQGNEEEAKKFLELIYILILAVIAIALVLEVLKKLAAKDPEIAKQLQENAERLSELMRQLEELLRQGNEEEAKKFLELIFRIIYEVIALAQLLEDS

SEQ ID NO: 842 - protein, 220 aa, synthetic construct
  REGION 1..220: note = Synthetic
DEEEQIYRYRLLAQLAAFELEVLFRRSGDPRALELFERLVELMKRVIETLQKDPEKAKELLQILWYLASAALAAVTLWQLFERSGDPRALELFERLVELMKRVIETLQKDPEKAKELLQILWYLASAALAAVTLWQLFERSGDPRALELFERLVELMKRVIETLQKDPEKAKELLKKLHNLALLALVAVILWEIFERTGDPRALELFEQIVETMKHNIES

SEQ ID NO: 843 - protein, 227 aa, synthetic construct
  REGION 1..227: note = Synthetic
SSEVERLILQIEVLARTLSEFTGDPELAERFLRLAKRVLEQVKTGFDAKELFEELLVLLMILLILLLAQQLSEQTGDPELAERFLRLAKRVLEQVKTGFDAKELFEELLVLLMILQILLLAQQLSEQTGDPELAERFLRLAKRVLEQVKTGFDARELFLELLVLLMILQILLLAQQLSEQTGDPELAERFLRLAKRVLEQVKTGFDALQLYVFLTRLLIILERLLLA

SEQ ID NO: 844 - protein, 202 aa, synthetic construct
  REGION 1..202: note = Synthetic
DELEQRVLQELAELHRLAKEAGDESALEILEKAKQALEEGDEEKLRFVLLLIKVAKSMIELYRLAKEAGDESALEILEKARQALQEGDEEKLRFVLLLIKVAKSMIELYRLAKEAGDESALEILEKARQALQEGDEEKLRFVLLLIKVAKSMIELYRLAKEAGDERALEILEKARQALQEGDEEKLRRVLEQIKNAKRLIKS

SEQ ID NO: 845 - protein, 245 aa, synthetic construct
  REGION 1..245: note = Synthetic
DLVEKVLEILAQIKSLADQLRRKDAEEAQRFQETARELEERVREAYQRGDDKTLRQVLLMASVIYLLLKIILLALRLRRKDAEEAQRFQETARELFERVKEAFQRGDDKTLRQVLLMASVIYLLLKIIELALKLRRKDAEEAQRFQETARELFERVKEAFQRGDDKTLRQVLLMAEVIYLLLKIIELALKLRRKDAEEAQRFQETARELFERVKEAFQRGDDETLLRVYELARKILVELESRERS

SEQ ID NO: 846 - protein, 211 aa, synthetic construct
  REGION 1..211: note = Synthetic
DEDEIRAEILVLLILLIAREIYKETGDEQALKLAEEAEEIEREVKAQKGSEELEELMRLVQALLLVAKILLIALQIYRETGDEQALKLAEEAFEILREVKAQKGSEELEELMRLVQALLLVAKILLIALQIYRETGDEQALKLAEEAFEILREVKAQKGSEELEELMKIVELLLLVAHLLLLALRHYREHGDEQARHVAEHAFQILRHIKS

SEQ ID NO: 847 - protein, 211 aa, synthetic construct
  REGION 1..211: note = Synthetic
DERENHALRLVNNILSIARNIFLETGDEQALKLAEEAFEIEREVKAQKGSEELEELMRLVQALLLVAKILLIALQIYRETGDEQALKLAEEAFEILREVKAQKGSEELEELMRLVQALLLVAKILLIALQIYRETGDEQALKLAEEAFEILREVKAQKGSEELEELMRLVRLLLLVAYLLLTALRLYREFGDEFALKIAEFAFELLRRVKA

SEQ ID NO: 848 - protein, 209 aa, synthetic construct
  REGION 1..209: note = Synthetic
DRERIEVLLILLEAAYFAEHAGNREILEILEKLLEQVRKASSPEEIRQLKELAEVLLILIQAAWHARVAGNEEILEILTKLMKQVAKASSPEEIRQLKELAEVLLILIQAAWHARVAGNEEILEILTKLMKQVAKASSPEEIRQLKELAEVLLILIQAAWFARVAGNEEILEILTKLMKQVAKASSPEEIRQLKEIAERLLLHIRYLTN

SEQ ID NO: 849 - protein, 209 aa, synthetic construct
  REGION 1..209: note = Synthetic
DKERLEVELILELAAVFAKYAGNEEILEILTKLMKQVAKASSPEEIRQLKELAEVLLILIEAAFHARLAGNEEILEILTKLMKQVAKASSPEEIRQLLQLARVLLILIQAAWHARVAGNEEILEILTKLMKQVAKASSPEEILRLYLLASVLLILIQAAWHARVAGNEEILEILTKLMKQVAKASSPEEILKLYRIAAELLLRIQLLFH

SEQ ID NO: 850 - protein, 209 aa, synthetic construct
  REGION 1..209: note = Synthetic
DEERLEVILILLRAAAFAYTAGNEEILEILTKLIKQVRKASSPEEIRQLKELAEVLLILIQAAYHARRAGNEEILEILTKLMKQVAKASSPEEIRQLKELAEVLLILIQAAWHARVAGNEEILEILTKLMKQVAKASSPEEIRQLKELAEVLLILIQAAWHARVAGNEEILEILTKLMKQVAKASSPEEIRRLLRLAYRLLLEIRLLWR

SEQ ID NO: 851 - protein, 242 aa, synthetic construct
  REGION 1..242: note = Synthetic
DELRKLRVHALYLAIEAEELVKRVLRETGDEKAQELLEEIIQILRQMKEVTDPEELKLLLLLLEAFVLAALAILLVLIVLRETGDEKAQELLEEIIQILRQMKEVTDPEELKLLLLLLEAFVLAALAILLVLIVLRETGDEKAQELLEEIIQILRQMKEVTDPEELKLLLLLLEAFVLAALAILLVLIVLRETGDEKAQELLEEIIQILRQMKEVTDPLKLETLLLELLSLVLKAEYLLRIL

SEQ ID NO: 852 - protein, 242 aa, synthetic construct
  REGION 1..242: note = Synthetic
LKLLLLREEAFRLAAYAIYIVFIVRYLTGDEKAQELLEEIEQILRQMKEVTDPEELKLLLLLLEAFVLAALAILLVLIVLRETGDEKAQELLEEIIQILRQMKEVTDPEELKLLLLLLEAFVLAALAILLVLIVLRETGDEKAQELLEEIIQILRQMKEVTDPEELKLLLLLLEAFVLAALAILLVLIVLRETGDEKAQELLEEIIQILRQMKEVTDPRELRQLLLRLLHLVLEARIILLYL

SEQ ID NO: 853 - protein, 242 aa, synthetic construct
  REGION 1..242: note = Synthetic
LKLERLREKAEELAYQAESLVRRVLRNTGDEKAQELLEEIIQILRQMKEVTDPEELKLLLLLLEAFVLAALAIYLVLIVLRETGDEKAQELLEEIIQILRQMKEVTDPEELKLLLLLLEAFVLAALAILLVLIVLRETGDEKAQELLEEIIQILRQMKEVTDPEELRLLLLLLEAFVLAALAILLVLIVLRETGDERAQELLEEIIQILRQMKEVTDPHELVRLLVQLLALVLLAEHILKLL

SEQ ID NO: 854 - protein, 218 aa, synthetic construct
  REGION 1..218: note = Synthetic
DELELELENTIRIVETLVRRAGDEEFRRLIEKILQEAKEALELGDPEMLRQAYLSALLMSTILLVLELVQKAGDEEFRRLIEKILQEAKEALELGDPRLLYHALLSALLMSTILEVLELVQKAGDEEFRRLIEKILQEAKEALELGDPRMLHEALLSARLMSTILEVLELVQKAGDEEFRRLIEKILQDAKEALELGDPELLSRALFRAEKMSVELKL

SEQ ID NO: 855 - protein, 218 aa, synthetic construct
  REGION 1..218: note = Synthetic
DLLETKLLVTIFEVETLVKRAGDEEFRRLIEKILQEAKEALELGDPEMLRQAYLSALLMSTILEVLFLVREAGDEEFRRLIEKILQEAKEALELGDPEMLKRALLSALLMSTILKVLELVQKAGDEEFRRLIEKILQEAKEALELGDPRMLDKALLSARLMSTILEVLELVQKAGDEEFRRLIEKILQEAKEALELGDPHKLIKALAQADLMSQELKS

SEQ ID NO: 856 - protein, 225 aa, synthetic construct
  REGION 1..225: note = Synthetic
SEMARLARYVETLVTLVRLHAEDLGDPELYELAKQIARIIWEALQAGDEELLRMALLAVIVLLLVARVSKYAKELGDPELYELAKQIARIIWEALQAGDEELLRMALLAVIVLLLVARVSKYAKELGDPELYELAKQIARIIWEALQAGDEELLRMALLAVEVLLLVARVSKYAKELGDPELYELAKQIARIIWEALQAGDERLLLHALELVIRLLTEAVHSRLA

SEQ ID NO: 857 - protein, 218 aa, synthetic construct
  REGION 1..218: note = Synthetic
SELERRHNEVQRVRLLAEYAGDEEAIKLAKELIERFIQAVREGDPEKIQRVLELLRMLYEVLLVLQLAQEAGDEEAIKLAKELIERFIQAVREGDPEKIQRVLELLRRLYLVLLVLKLAQEAGDEEAIKLAKELIERFIQAVREGDPHKIKHVLVLLYILYLVLEVLKLAQEAGDEEAIKLAKELIERFIQAVREGDPEKIKRVLKRLIELYLELLRS

SEQ ID NO: 858 - protein, 244 aa, synthetic construct
  REGION 1..244: note = Synthetic
DEWELKELEAEYLILKAEIIIRRILREFGDPRAEELAQQLIEDLRQLKNARSKEEFEWYLKLIKAVVLIVEALLIILRILREFGDPRAEELAQQLIEDLRQLKNARSKEEFEWYLKLIKAVVLIVEALLIILRILREFGDPRAEELAQQLIEDLRQLKNARSKEEFEWYLKLIKAVVLIVEALLIILRILREFGDPRAEELAQQLIEDLRQLKNARSEEEFEHYLLRIKRVVKNVKDLLERLRS

SEQ ID NO: 859 - protein, 244 aa, synthetic construct
  REGION 1..244: note = Synthetic
DEWERKLLEAELLIQRAEHIIREILREFGDPRAEELAQQLIEDLRQLKNARSKEEFEWYLKLIKAVVLIVEALLIILRILREFGDPRAEELAQQLIEDLRQLKNARSKEEFEWYLKLIKAVVLIVEALLIILRILREFGDPRAEELAQQLIEDLRQLKNARSKEEFEWYLLLIKAVVLIVEALLIILRILREFGDPRAEELAQQLIEDLRQLKNARSEEEFRHYLRLIQRVVREVEQLLEELRL

SEQ ID NO: 860 - protein, 244 aa, synthetic construct
  REGION 1..244: note = Synthetic
DEWEKKEYEARILIYRAELIIELILRRFGDPRAEELAQQLIEDLRQLKNARSKEEFEWYLKLIKAVVLIVEALLIILEILKEFGDPRAEELAQQLIEDLRQLKNARSKEEFEWYLKLIKAVVLIVEALLIILRILREFGDPRAEELAQQLIEDLRQLKNARSKEEFQHYLLLIEAVVLIVEALLIILRILREFGDPRAEELAQQLIEDLRQLKNARSKEEFEHYLERIFRVVTEVKLLLHSLRN

SEQ ID NO: 861 - protein, 245 aa, synthetic construct
  REGION 1..245: note = Synthetic
DKLEEEIRRIEALVYYAETILRDLWQRYGDERAQEMTEQLRETIEELKKLADDPEKAKLFIEIAEILVLVVEALQILLQLWQRYGDERAQEMTEQLRETIEELKKLADDPEKAKLFIEIAEILVLVVEALLILLQLWQRYGDERAQEMTEQLRETIEELKKLADDPEKAKLFIEIAEILVLVVEALLILLQLWQRYGDERAQEMTEQLRETIEELKKLADDPEKAKEFIRIALELVLRVFILKVS

SEQ ID NO: 862 - protein, 245 aa, synthetic construct
  REGION 1..245: note = Synthetic
DLLLRQIEHLVYLVEQIARELVREGLGAEEAQKHAEKAKELLERAQQAKDPEEIRIMLLLLQILLLVIQVLQIALQLVKEGLGAEEAQKHAEKAKELLERAQQAKDPEEIRIMLLLLQILLLVIQVLQIALQLVKEGLGAEEAQKHAEKAKELLERAQQAKDPEEIRIMLLLLQILLLVIQVLQIALQLVKEGLGAEEAQKHAEKAKELLERAQQAKDPREIERALLRLRLLLHKIRVLKRELEL

SEQ ID NO: 863 - protein, 245 aa, synthetic construct
  REGION 1..245: note = Synthetic
DLLRKQIHRLVLLVKLIADELVREGLGAEEAQKHAEKAKELLERAEQAKDPEEIRIMLLLLQILLLVIQVLQIALQLVKEGLGAEEAQKHAEKAKELLERAQQAKDPEEIRIMLLLLQILLLVIQVLQIALQLVKEGLGAEEAQKHAEKAKELLERAQQAKDPEEIRIMLLLLQILLLVIQVLQIALQLVKEGLGAEEAQKHAEKAKELLERAQQAKDPHFIKRMLLRLELLLTKIRTLLRELRL

SEQ ID NO: 864 - protein, 250 aa, synthetic construct
  REGION 1..250: note = Synthetic
DIEILEAHILISVAETFVRIIKEYFPEEEAKKFTEIMQRLLERLYEATKRGDEESIRFVSLLLLALVLILRASLLVLYIKRHFPEEEAKKFTEIMQRLLERLYEATKRGDEKTILHVLLLLEALLLILLASLYVLRIKQYFPEEEAKKFTEIMQRLLERLYEATKRGDTQSIVHVYVLLVALLLILQASEYVLRIKQYFPEEEAKKFTEIMQRLLERLYEATKRGDHESILQVLALLLHLLLQLRLSEIS

SEQ ID NO: 865 - protein, 218 aa, synthetic construct
  REGION 1..218: note = Synthetic
DELEIKLRSIALEAELFARRLGDEEFLELVEEVTRRASEALKRGDPEKIKKAILLFELIIMAVRAILYARRLGDEEFLELVEEVTRRASEALKRGDPKKIHKAILLFELIIMAVQAIQYARQLGDEEFLELVEEVTRRASEALKRGDPRKIHKAIILFELIIMAVQAIQYARQLGDEEFLELVEEVTRRASEALKRGDPKKIFHAILLFEEIIQEVRS

SEQ ID NO: 866 - protein, 218 aa, synthetic construct
  REGION 1..218: note = Synthetic
DELEVELSEIAFQAESFARLLGDEEFLELVEEVTRRASEALKRGDPEKIKKAILLFELIIMAVRAILFARQLGDEEFLELVEEVTRRASEALKRGDPEKIKKAILLFELIIMAVQAILYARQLGDEEFLELVEEVTRRASEALKRGDPEKIKKAILLFRLIIAAVQAIQYARQLGDEEFLELVEEVTRRASEALKRGDPEKIKEAIVLFEEIITRVQL

SEQ ID NO: 867 - protein, 225 aa, synthetic construct
  REGION 1..225: note = Synthetic
DEMAHIAEKVRTYVRLVELYARELGDPELYELAKQIARIIWEALQAGDEELLRMALLAVIVLLLVARVSKYAKELGDPELYELAKQIARIIWEALQAGDEELLRMALLAVIVLLLVARVSKYAKELGDPELYELAKQIARIIWEALQAGDEELLRMALLAVIVLLLVAQVSKFAKELGDPELYELAKQIARIIWEALQAGDERLLHRALILVLRLLAEALESYLA

SEQ ID NO: 868 - protein, 218 aa, synthetic construct
  REGION 1..218: note = Synthetic
DELEHELRLIAKQAHQYARQLGDEEFLELVEEVTRRASEALKRGDPEKIKKAILLFELIIMAVQAIQYARQLGDEEFLELVEEVTRRASEALKRGDPEKIKKAILLFELIIMAVQAIQYARQLGDEEFLELVEEVTRRASEALKRGDPEKIKKAILLFELIIMAVQAIQYARQLGDEEFLELVEEVTRRASEALKRGDPRKIKKAIALFLSIIYLVQL

SEQ ID NO: 869 - protein, 252 aa, synthetic construct
  REGION 1..252: note = Synthetic
LKLEQARRFLIEALIALFSLEHAYRETGDESAREALQLLLEVIKLVVEMLRKNPEEALKLAQAVFFLAEAAKAIIELIHAYKETGDESAREALQLLLEVIKLVVEMLRKNPEEALKLAQAVFFLAEAAKAIIELIRAYKETGDESAREALQLLLEVIKLVVEMLRKNPEEALKLAQAVFFLAEAAKAIIELIRAYKETGDESAREALQLLLEVIKLVVEMLRKNPEEALKLAQAVHREAHQAFVIIFQILYS

SEQ ID NO: 870 - protein, 251 aa, synthetic construct
  REGION 1..251: note = Synthetic
SDEIFRLQLLLQELIYEMEKIWRQNPNAESALKASQSLREAIEEAKRYQQEGDYEKAVTVLEIAFLLALLLKLIYEMEEIWRQNPNAESALKASQSLREAIEEAKRYQQEGDYEKAVTVLEIAFLLALLLKLIYEMEEIWRQNPNAESALKASQSLREAIEEAKRYQQEGDYEKAVTVLEIAFLLALLLKLIYEMEEIWRQNPNAKLALRASQILREAIEEAKRLQQEGDYEKAVQILRLAFEIARHLKEL

SEQ ID NO: 871 - protein, 247 aa, synthetic construct
  REGION 1..247: note = Synthetic
SESVAVLLELIHRLEANALRYTERTGDESFKKAYEDLRKASEEVQKYIQQGNWEKALIVASVAVLLALIYELMAKAREFTERTGDESFKKAYEDLRKASEEVQKYIQQGNWEKALIVASVAVLLALIYELMAIAREFTERTGDESFKKAYEDLRKASEEVQKYIQQGNWEKALIVALVAVLLALIYRLMAEAREFTERTGDELFKKAYEDLRKASEEVQKYIQQGNWEEALRVAIEAVNRALTHRQS

SEQ ID NO: 872 - protein, 269 aa, synthetic construct
  REGION 1..269: note = Synthetic
DFLQEEAIRLALEVIIIVYSIKRQAESEEDQKRAQELLEKIVEIAEQLRESLEEGDPEEARTMFLILQAILLALQVILLVIRIKQTAESEEDQKRAQELLEKIVEIAEQLTESLREGDPEEARTMFLILQAILLALQVILLVIRIKQTAESEEDQKRAQELLEKIVEIAEQLTESLREGDPEEARTMLLILLAILLALQVILLVIRIKQTAESEEDQKRAQELLEKIVEIAEQLTESLREGDPREALHMLIILFRILSELEVILRLIRS

SEQ ID NO: 873 - protein, 254 aa, synthetic construct
  REGION 1..254: note = Synthetic
SRLELRAQIIALEVRILVEEIKEHAKSEEDIERAKEIAERIIELMRQAQNVSPEQVQKILLLLKALLLALEVLKLVIQIVEHAKSEEDIERAKEIAERIIELMRQAQNVSPEQVQKILLLLKALLLALEVLKLVIQIVEHAKSEEDIERAKEIAERIIELMRQAQNVSPEQVQKILLLLKALLLALEVLKLVIQIVEHAKSEEDIERAKEIAERIIELMRQAQNVSPEQVRRILHELRALLLRLEALLHRIRSS

SEQ ID NO: 874 - protein, 254 aa, synthetic construct
  REGION 1..254: note = Synthetic
DLLEDRAIAIASIVKTLVELIVKKAKSEEDIERAKEIAERIIELMRQAQNVSPEQVQKILLLLKALFLALEVLLIVIYIVVQAKSEEDIERAKEIAERIIELMRQAQNVSPYQVQHILLLLKALLLALEVLLLVIEIVEHAKSEEDIERAKEIAERIIELMRQAQNVSPEQVFEILLLLKALLLALEVLKLVIRIVEHAKSEEDIERAKEIAERIIELMRQAQNVSPEQVAEILLRLLELLLELQRLLEEIERV

SEQ ID NO: 875 - protein, 222 aa, synthetic construct
  REGION 1..222: note = Synthetic
DYMEELLLEARSIIYHAENLVELTGDEESSEQLREVLQEIIEALREGDPEKIYMILLLAQALRIIIEALRLVQRTGDEESSEQLREVLQEIIEALREGDPEKIYMILLLAQALLIIIKALLLVQKTGDEESSEQLREVLQEIIEALREGDPEKIFLILLLARALLVIIKALLLVQKTGDEESSEQLREVLQEIIEALREGDPEKIVRILAEAYFLLILIKHS

SEQ ID NO: 876 - protein, 241 aa, synthetic construct
  REGION 1..241: note = Synthetic
LIAERSALRALQEILVILNEAELAGDEELYRRLKELYEQLRQDAEEVRRNGDVELLIASASAFSALVQILEILLKAKEAGDEELYRRLKELFEQLQQDMEEVKRNGDVELLIASASAFSALVQILEILLKAKEAGDEELYRRLKELFEQLQQDMEEVKRNGDVELLIASASAFSALVQILEILLKAKEAGDEELYRRLKELFEQLQQDMEEVKRNGDVELLIASAHQFRLIVQELRVRLLS

SEQ ID NO: 877 - protein, 241 aa, synthetic construct
  REGION 1..241: note = Synthetic
SEAERLAIQALSEILQILVDAEEAGDEELYRRLKELFEQLQQDAEEVHRNGDVELLIASASAFSALVQILEILLKAKEAGDEELYRRLKELFEQLQQDMEEVKRNGDVELLIASASAFSALVQILEILLKAKEAGDEELYRRLKELFEQLQQDMEEVKRNGDVELLIASASAFSALVQILEILLKAKEAGDEELYRRLKELFEQLQQDMEEVKRNGDVELLIASAHRFRLIVEILENELEL

SEQ ID NO: 878 - protein, 225 aa, synthetic construct
  REGION 1..225: note = Synthetic
SELEIFALYVELLVQRVSKYAKELGDPELYELAKQIARIIWEALQAGDEELLRMAELAVIVLLLVARVSKYAKELGDPELYELAKQIARIIWEALQAGDEELLRMALLAVIVLLLVARVSKYAKELGDPELYELAKQIARIIWEALQAGDEELLRMALIAVIVLLLVARVSKYAKELGDPELYELAKQIARIIWEALQAGDKELLYQALSEVIQLLLEAIRSKRA

SEQ ID NO: 879 - protein, 241 aa, synthetic construct
  REGION 1..241: note = Synthetic
DIAERLAFLALALILFILEKAKEAGDEELYRRLKELFEQLQQDMEEVRRNGDVELLIASASAFSALVQILLILLKAKEAGDEELYRRLKELFEQLQQDMEEVKRNGDVELLIASASAFSALVQILEILLKAKEAGDEELYRRLKELFEQLQQDMEEVKRNGDVELLIASASAFSALVQILEILLKAKEAGDEELYRRLKELFEQLQQDMEEVKRNGDTQRLLHSAQEFKVTVRTLEQELKS

SEQ ID NO: 880 - protein, 285 aa, synthetic construct
  REGION 1..285: note = Synthetic
DEIEEEVHRAEFLARFAVTLLERMLEQNPHAEEAKEIIEILLELLQSAVESLRRLKQTGDEEYLRTLQIIVEVIKAVVLAAEAVYLLMKMLKQNPHAEEAKEIIEILLELLQSAVESLRRLKQTGDEEYLRTLQIIVEVIKAVVLAAIAVFLLMEMLKQNPHAEEAKEIIEILLELLQSAVESLRRLKQTGDEEYLRTLQIIVEVIKAVVLAAIAVFLLMEMLKQNPHAEEAKEIIEILLELLQSAVESLRRLKQTGDEEYLRTLREIVRRIYRVVLEAHFFFQS

SEQ ID NO: 881 - protein, 266 aa, synthetic construct
  REGION 1..266: note = Synthetic
SEVFRVASHAFEVYLLVYELLHQIKLAGNEEFYEKALEILRLARRIIEKATEAARRGDKELVQVLSIAAQALLVFAQVLFLLMQIKLAGNEEFYEKALEILRLAKRIIEKALEATERGDKELVQVLSIAAQALLVFAQVLFLLMQIKLAGNEEFYEKALEILRLAKRIIEKALEATERGDKELVQVLSIAAQALLVFAQVLFLLMQIKLAGNEEYYRNALRILRLAKRIIEKALEATERGDKELVQVLSEFAERLLQFAENLFLLS

SEQ ID NO: 882 - protein, 268 aa, synthetic construct
  REGION 1..268: note = Synthetic
DELESFLRQALEVFHQVLLVLKTVKQSGDPEEIRQAKELVRLAIELTARAFEAFQNGDKETLELLSFLLQALSVMVQVILVLYTVKQSGDPEEIRQAKELSRKAKELTERAEEAFKNGDKETLELLSFLLQALSVMVQVILVLYTVKQSGDPEEIRQAKELSRKAKELTERAEEAFKNGDKETLELLSFLLQALSVMVQVILVLYTVKQSGDPALRLNAEELSRKAKELTERAEEAFKNGDKETLELLSEELERLSERVKNIEYNYHS

SEQ ID NO: 883 - protein, 268 aa, synthetic construct
  REGION 1..268: note = Synthetic
LELLSFLKQAHRVLLQVLNVLFTVLRSGDPEERRQAEELLRKAIELTELAIRAFKNGDKETLELLSFLLQALSVMVQVILVLYTVKQSGDPEEIRQAKELSRKAKELTERAEEAFKNGDKETLELLSFLLQALSVMVQVILVLYTVKQSGDPEEIRQAKELSRKAKELTERAEEAFKNGDKETLELLSFLLQALSVMVQVILVLYTVKQSGDPEEIRQAKELSRKAKELTERAEEAFKNGDKETLELLSFLLERLVIRVHIILNYFEH

SEQ ID NO: 884 - protein, 272 aa, synthetic construct
  REGION 1..272: note = Synthetic
DRLEELASRAIELVNLARLIAYSIRVHATSPEAQKVAETLIEIVLEIERIIEEALQRNDEEKIRLVMLAASAAWYVASAVLLAIKILKLATSPEAQKVAETLIEIVLEILRIIQEALQRNDEEKIRLVMLAASAAWYVASAVLLAIKILRLATSPEAQKVAETLIEIVLEILRIIQEALQRNDEEKIRLVMLAASAAWFVASAVLLAIKILRLATSPEAQKVAETLIEIVLEILRIIQEALQRNDEEKIREVLKQAEEAVFLAQLVLVKIRS

SEQ ID NO: 885 - protein, 272 aa, synthetic construct
  REGION 1..272: note = Synthetic
SELEELAVRALEFVFRAHLNAHLILRNATSPEAQKVAETLIEIVLEILRIIQEALQRNDEEKIRLVMLAASAAFYVASAVLLAIKILRRATSPEAQKVAETLIEIVLEILRIIQEALQRNDEEKIRLVMLAASAAWYVASAVLLAIKILRLATSPEAQKVAETLIEIVLEILRIIQEALQRNDREKIYLVLLAASAAWFVASAVLLAIKILRLATSPEAQKRAETLIEIVLEILRIIQEALQRNDFEKILEVLLLATRAFLHAKSVLYLIEL

SEQ ID NO: 886 - protein, 272 aa, synthetic construct
  REGION 1..272: note = Synthetic
DEIELLAEEAHLLLNQAERLARRILKEAQSPEAKKIAQLLLEILMRILEKLLEALEAGDEEQLRIILLAAMAVLLLAQAVLLAVRILKEAQSPEAKKIAQLLLEILMRILEKLLEALEAGDEEQLRIILLAAMAVLLLAQAVLLAVRILKEAQSPEAKKIAQLLLEILMRILEKLLEALEAGDEEQLRIILLAAMAVLLLAQAVLLAVRILKEAQSPEAKKIAQLLLEILMRILEKLLEALEAGDEKLLREILTEAYLVLLEAYRVQLRVES

SEQ ID NO: 887 - protein, 272 aa, synthetic construct
  REGION 1..272: note = Synthetic
DEIEIIALEAEALLLQAFAIALRIKHEAQSPEAKKIAQLLREILMRILEKLLEALEAGDEEQLRIILLAAMAVLLLAQAVLLAVRILKEAQSPEAKKIAQLLLEILMRILEKLLEALEAGDEEQLRIILLAAMAVLLLAQAVLLAVRILKEAQSPEAKKIAQLLLEILMRILEKLLEALEAGDEEQLRIILLAAMAVLLLAQAVLLAVRILKEAQSPEAKKIAQLLLEILMRILEKLLEALEAGDEEQLREILLLAEYVRLQALLVLYQVHS

SEQ ID NO: 888 - protein, 272 aa, synthetic construct
  REGION 1..272: note = Synthetic
SRIEQLAIHARLLLLLAEVAAEYIKLTAQSPEAKKIAQLLLEILMRILEKLLEALEAGDEEQLRIILLAAMAVLLLARAVILAVRILQEAQSPEAKKIAQLLLEILMRILEKLLEALEAGDEEQLRIILLAAMAVLLLAQAVLLAVRILKEAQSPEAKKIAQLLLEILMRILEKLLEALEAGDEEQLRIILLAAEAVLLLAQAVLLAVRILKEAQSPEAKKIAQLLLEILMRILEKLLEALEAGDKHLLSEIYILALRVLVQALQVLHRVES

SEQ ID NO: 889 - protein, 222 aa, synthetic construct
  REGION 1..222: note = Synthetic
DRLEEIARYVRILVELVETLAEHLGDPEIYENAREIARIILEALQRGDLEQLELALLAVKVLLLVAKVLFFAKQLGDPEIYENAREIARIILEALQRGDLEQLELALLAVKVLLLVAKVLFFAKQLGDPEIYENAREIARIILEALQRGDLRQLELALIAVQVLLLVAKVLFFAKQLGDPEIYENAREIARIILEALQRGDTELLAKAFFLVLRLLEEARRL

SEQ ID NO: 890 - protein, 272 aa, synthetic construct
  REGION 1..272: note = Synthetic
DEIELIATEAHNLLHLAEQLARFIRRRAQSPEAKKIAQLLLEILMRILEKLLEALEAGDEEQLRIILLAAMAVLLLAKAVVLAVRILKEAQSPEAKKIAQLLLEILMRILEKLLEALEAGDEEQLRIILLAAMAVLLLAQAVLLAVRILKEAQSPEAKKIAQLLLEILMRILEKLLEALEAGDEEQLKIILLAAMAVLLLAQAVLLAVRILKEAQSPEAKKIAQLLLEILMRILEKLLEALEAGDHHLLLQILALAFEVLLNAERVLKAVRI

SEQ ID NO: 891 - protein, 272 aa, synthetic construct
  REGION 1..272: note = Synthetic
DEIEHLAIKAHLLLLEAESIAHLIRKLAQSPEAKKIAQLLLEILMRILEKLLEALEAGDEEQLRIILLAAMAVLLLAQAVLLAVRILKEAQSPEAKKIAQLLLEILMRILEKLLEALEAGDEEQLRIILLAAMAVLLLAQAVLLAVRILKEAQSPEAKKIAQLLLEILMRILEKLLEALEAGDEEQLRIILLAAMAVLILAQAVLLAVRILKEAQSPEAKKIAQLLLEILMRILEKLLEALEAGDEELLNRILSLAFHVFLEAHTVLLRVRS

SEQ ID NO: 892 - protein, 266 aa, synthetic construct
  REGION 1..266: note = Synthetic
DEIEYRLKQLVLEAELLARRIKRKATSPEVREIAERAIEWALQILQKIEQIERRGDKEKLEILLILLLLIILVLLAVLLAIEIKRKATSPEVREIAERAIEWALQILQKIEQIERRGDKEKLEILLILLLLIILVLLAVLLAIEIKRKATSPEVREIAERAIEWALQILQKIEQIERRGDKEKLEILLILLLLIILVLLAVLLAIEIKRKATSPEVREIAERAIEWALQILQKIEQIERRGDKEKLEILRKELLEILLLLKIVLTS

SEQ ID NO: 893 - protein, 266 aa, synthetic construct
  REGION 1..266: note = Synthetic
SEIELRLERLVLEARLLAQHIKRLATSPEVREIAERAIEWALQILQKIEQIERRGDKEKLEILLILLLLIILVLLAVLLAIEIKRKATSPEVREIAERAIEWALQILQKIEQIERRGDKEKLEILLILLLLIILVLLAVLLAIEIKRKATSPEVREIAERAIEWALQILQKIEQIERRGDKEKLEILLILLLLIILVLLAVLLAIEIKRKATSPEVREIAERAIEWALQILQKIEQIERRGDKEKLEELERLLYRIILLLLIVLNS

SEQ ID NO: 894 - protein, 266 aa, synthetic construct
  REGION 1..266: note = Synthetic
SQIEAELEQLVLIAEVNAKIIKNQATSPEVREIAERAIEWALQILQKIEQIERRGDKEKLEILLILLLLILLVLLAVILAIQIKRKATSPEVREIAERAIEWALQILQKIEQIERRGDKEKLEILLILLLLIILVLLAVLLAIEIKRKATSPEVREIAERAIEWALQILQKIEQIERRGDRRKLLFLRLLLLLIILVLLAVLLAIEIKRKATSPEVREIAERAIEWALQILQKIEQIERRGDYEKLIKLYAELVEIILLLELVLES

SEQ ID NO: 895 - protein, 253 aa, synthetic construct
  REGION 1..253: note = Synthetic
DELIELFFELVLELLLIATRIIIHATDEEDIERAKRFLEKAKEIVERARTMNPEELKFLLLILQFYLLVVQLMLIAIEIVKHATDEEDIERAKRFLEKAVEIVERAQTMNPEELKFLLLILQFYLLVVQLMLIAIEIVKHATDEEDIERAKRFLEKAVEIVERAQTMNPEELKFLLLILQFYLLVVQLMLIAIEIVKHATDEEDIERAKRFLEKAVEIVERAQTMNPEELKHLLRELRRLLDQVETMLRLIRS

SEQ ID NO: 896 - protein, 245 aa, synthetic construct
  REGION 1..245: note = Synthetic
DQFERTVALALYLAFLIRNIATSEEDARTAEEMARTAEEIVRNIQRGKQDAEELWWLLQFVLTVLQAIFLAIRIVKTATSEEDARTAEEMARTALEIVLNIKRGKQDAEELWWLLQFVLTVLQAIFLAIQIVKTATSEEDARTAEEMARTALEIVLNIKRGKQDAEELWWLLQFVLTVLQAIFLAIQIVKTATSEEDARTAEEMARTALEIVLNIKRGKQDEHELYHELLRVLNELKTIFESIQL

SEQ ID NO: 897 - protein, 237 aa, synthetic construct
  REGION 1..237: note = Synthetic
DDLRELALELLLQVQRLLEQARKEGDEEIFEIIRQLYEEVEEAIRQYERTGDPKYILLALALWLLAQVAWLLSQARKEGDEEIFEIIRQLFEEVEEAIEQYKRTGDPKYILLALALWLLAQVAWLLSQARKEGDEEIFEIIRQLFEEVEEAIEQYKRTGDPKYILLALALWLLAQVAWLLSQARKEGDDLVFELIRRNFELVEEAIEQYKRTGDPKYILLAERLKRAAELAFEVSKL

SEQ ID NO: 898 - protein, 237 aa, synthetic construct
  REGION 1..237: note = Synthetic
SDLYHEALVLLSLVYHLLELAEREGDEEIFEIIRQLFEEVKEAIEQYERTGDPKYILLALALWLLAQVAWLLSQARKEGDEEIFEIIRQLFEEVEEAIEQYKRTGDPKYILLALALWLLAQVAWLLSQARKEGDEEIFEIIRQLFEEVEEAIEQYKRTGDPKYILLALALWLLAQVAWLLSQARKEGDEEVFEFIRQLFEKVEEAIEQYKRTGDPKYIKRAHTLHLLALVAFLSTQS

SEQ ID NO: 899 - protein, 237 aa, synthetic construct
  REGION 1..237: note = Synthetic
DILFELASRLLHLVLHLLYLAHHEGDEEIFEIIRQLFEEVHEAIEQFRRTGDPKYILLALALWLLAQVAWLLSQARKEGDEEIFEIIRQLFEEVEEAIEQYKRTGDPKYILLALALWLLAQVAWLLSQARKEGDEEIFEIIRQLFEEVEEAIEQYKRTGDPKYILLALALWLLAQVAWLLSQARKEGDEEAFEFIRKLFEEVEEAIEQYKRTGDPKYILLAEQLIRQAELAFLISQS

SEQ ID NO: 900 - protein, 222 aa, synthetic construct
  REGION 1..222: note = Synthetic
DELELIARQVRLLVEQVEYFARRLGDPEIYENAREIARIILEALQRGDLEQLELALLAVKVLLLVAKVLFFAKQLGDPEIYENAREIARIILEALQRGDLEQLELALLAVKVLLLVAKVLFFAKQLGDPEIYENAREIARIILEALQRGDLHQLELALIAVKVLLLVAKVLFFAKQLGDPEIYENAREIARIILEALQRGDEKLLIRAYELVVELLRVAKVL

SEQ ID NO: 901 - protein, 237 aa, synthetic construct
  REGION 1..237: note = Synthetic
DDLYRHAVILLTEVEILLRRARKEGDEEIFEIIRQLFEEVEEAIEQYRRTGDPKYILLALALWLLAQVAWLLSQARKEGDEEIFEIIRQLFEEVEEAIEQYKRTGDPKYILLALALWLLAQVAWLLSQARKEGDEEIFEIIRQLFEEVEEAIEQYKRTGDPKYILLALALWLLAQVAWLLSQARKEGDEDLFEFIRELFERVEEAIEQYKRTGDPRYIRLAIALHNAALTAFELVRS

SEQ ID NO: 902 - protein, 237 aa, synthetic construct
  REGION 1..237: note = Synthetic
DILFELAVRLLLLVLYLLLLASLEGDEEIFEIIRQLFEEVHEAIEQFRRTGDPKYILLALALWLLAQVAWLLSQARKEGDEEIFEIIRQLFEEVEEAIEQYKRTGDPKYILLALALWLLAQVAWLLSQARKEGDEEIFEIIRQLFEEVEEAIEQYKRTGDPKYILLALALWLLAQVAWLLSQARKEGDEEIFETIRQLFEEVEEAIEQYKRTGDPKYILLAEKLRTQAKHAYDRSRS

SEQ ID NO: 903 - protein, 264 aa, synthetic construct
  REGION 1..264: note = Synthetic
DIEEEIFELASRIRLMFERVKEKLKTMSEEEIEQLLRVLQEAIELVVKALRLAQQGSLEEALILALIALLAVLIALMFAKVKEKLKTMSEEEIEQLLRVLQEAIELVVKALRLAQQGSLEEALILALIALLAVLIALMFALVKEKLKTMSEEEIEQLLRVLQEAIELVVKALRLAQQGSLEEARRLAYIALLAVLIALMFALVKEKLKTMSEEEIERLLRILQEAIELVVKALRLAQQGSLREALELAAKAYNLVLLALQYARL

SEQ ID NO: 904 - protein, 264 aa, synthetic construct
  REGION 1..264: note = Synthetic
DIRVEIKVLAHTIRLLFEEVKEKLKTMSEEEIEQLLRVLQEAIELVVKALRLAQQGSLEEALILALIALLAVRIAINFAQVKEKLKTMSEEEIEQLLRVLQEAIELVVKALRLAQQGSLHEAHLLALIALLAVLIAYMFALVKEKLKTMSEEEIEQLLRVLQEAIELVVKALRLAQQGSLREAYILALIALLAVLIALMFALVKEKLKTMSEEEIEELLRILQEAIELVVKALRLAQQGSLKEALRLALEALTLVEIALLYAEL

SEQ ID NO: 905 - protein, 241 aa, synthetic construct
  REGION 1..241: note = Synthetic
SEEEKIEHKVRVLLRLLEQIAKLTGDEELIQEMRELVEQIKQLLEEAKRTGDLRLFTQALIAAQVAFFIALLFEIAEKTGDEELIQEMRELVEQIKQLLEEAKRTGDLRLFTQALIAAQVALFIALLFEIAEKTGDEELIQEMRELVEQIKQLLEEAKRTGDQRLFDQALIAAQVALFIALLFEIAEKTGDEELIQEMRELVEQIKQLLEEAKRTGDFRLFNEALLLARIALQIAEEFEEA

SEQ ID NO: 906 - protein, 241 aa, synthetic construct
  REGION 1..241: note = Synthetic
SEQEEIELLVLELLSQLEDIAKFTGDEELIQEMRELVEQIKQLLEEAKRTGDLRLFTQALIAAQVAYFIALLFFIALFTGDEELIQEMRELVEQIKQLLEEAKRTGDLRLFTQALIAAQVALFIALLFKIALQTGDEELIQEMRELVEQIKQLLEEAKRTGDRRLFYQALIAARVALFIALLFEIAEKTGDEELIQEMRELVEQIKQLLEEAKRTGDLRLFFEALELAFQAYLIAEFFEIS

SEQ ID NO: 907 - protein, 250 aa, synthetic construct
  REGION 1..250: note = Synthetic
LMLEELELLVEHLETELRTAVRAGDPEKVEKAWKLLEEVSQQIRELSEEAKREGDKQLMLEILELLVRLLNSLLRTAVEAGDPEKVEKAWKLLEEVSQQIRELSEEAKREGDKQLMLEILELLVRLLNSLLRTAVEAGDPEKVEKAWKLLEEVSQQIRELSEEAKREGDKQLMLEILELLVRLLNSLLRTAVEAGDPEKVEKAWKLLEEVSQQIRELSEEAKREGDEELLDLIEILLLRLRYSLLRTRRE

SEQ ID NO: 908 - protein, 204 aa, synthetic construct
  REGION 1..204: note = Synthetic
SEIERLEFLAIKVRALIHVIELLAERTGDEEVEELARQAKENVEKALEHLRQMKETGDEKYSEIAELLLRAAEVLLLIAEILYLAKQTGDEEVEELARQAKENVEKALEHLRQMKETGDEKYSEIAELLLRAAEVLLLIAEILTLAKQTGDEEVEELARQAKENVEKALEHLRQMKETGDEKYSEIAELLLRAAHQLLLRAEHL

SEQ ID NO: 909 - protein, 204 aa, synthetic construct
  REGION 1..204: note = Synthetic
DEIEQLEILATYVRQQIEHILRLAKETGDEEVEELARQAKENVEKALEHLRQMKETGDEKYSEIAELLLRAAEVLLLIARILTLAKQTGDEEVEELARQAKENVEKALEHLRQMKETGDEKYSEIAELLLIAAEVLLLIAEILTLAKQTGDEEVEELARQAKENVEKALEHLRQMKETGDEKYSERALRILTRALELLLRARAL

SEQ ID NO: 910 - protein, 204 aa, synthetic construct
  REGION 1..204: note = Synthetic
DEILHLELFAELVEKLIEHILTLAKQTGDEEVEELARQAKENVEKALEHLRQMKETGDEKYSEIAELLLRAAYVLLQIAEILTLAKQTGDEEVEELARQAKENVEKALEHLRQMKETGDKLYSVIAFLLLLAAEVLLLIAEILTLAKQTGDEEVEELARQAKENVEKALEHLRQMKETGDQRYLERAARLLYEALVLLFIARAL

SEQ ID NO: 911 - protein, 222 aa, synthetic construct
  REGION 1..222: note = Synthetic
LELALLAREVRQLVQLVEVSARLLGDPEIYENAREIARIILEALQRGDLEQLELALLAVKVLLLVAKVLFFAKQLGDPEIYENAREIARIILEALQRGDLEQLELALLAVKVLLLVAKVLFFAKQLGDPEIYENAREIARIILEALQRGDLEQLELALLAVKVLLLVAEVLFFAKQLGDPEIYENAREIARIILEALQRGDLEQLHRALREVIQLLSEALES

SEQ ID NO: 912 - protein, 234 aa, synthetic construct
  REGION 1..234: note = Synthetic
DELETEAVILLLRVFQLATELKRKAGDESAQEILEQARRLAEEVKHLSAEEIREQLQIAKAMYWLLLVVLLAILLKKKAGDESAQEILEQASRLAREVQHLSAEEIREQLQIAKAMYWLLLVVLLAILLKKKAGDESAQEILEQASRLAREVQHLSAEEIREQLQIAKAMYWLLLVVLLAILLKKKAGDESAQEILEQASRLAREVQHLSRKEILQQLTRAIYLFLELEIRLKS

SEQ ID NO: 913 - protein, 290 aa, synthetic construct
  REGION 1..290: note = Synthetic
DEIVDRIKFEALELILRVRFLLERLSKRGDFEEMKRTLEEFLEQLKRSLQEWIEQAKQTGNEELIIRVIVSAIYVWAELLISVVRALLEALSKRGDFEEMKRTLEEFLEQLKRSLQEWIEQAKQTGNEELIIRVIVSAIYVWAELLISVVRALLEALSKRGDFEEMKRTLEEFLEQLKRSLQEWIEQAKQTGNEELIIRVIVSAIYVWAELLISVVRALLEALSKRGDFEEMKRTLEEFLEQLKRSLQEWIEQAKQTGNEELIIRVIVSAREVWLELRQSVERALDQALL

SEQ ID NO: 914 - protein, 281 aa, synthetic construct
  REGION 1..281: note = Synthetic
SETERLYTEAVLLVSFAETVLKFLRHMDEEIRQTLLQLVKEALKKILEIARQLEKIARRVDDPELLTEILFLVAELLVRVAQLMLELLRYMDEEEIQELLQRVKEALKKILEIARQLEKIARRVDDPELLTEILFLVAELLVRVAQLMLELLRYMDEEEIQELLQRVKEALKKILEIARQLEKIARRVDDPELLTEILFLVAELLVRVAQLMLELLRYMDEEEIQELLQRVKEALKKILEIARQLEKIARRVDDPELHLHILRLVTELKLHVFKLEILLLS

SEQ ID NO: 915 - protein, 281 aa, synthetic construct
  REGION 1..281: note = Synthetic
SLTFQLFQEAKLLVIEAQDMLELLRYMDEEEIQELLQKVKEALKKILEIARQLEKIARRVDDPELLTEILFLVAELLVRVAQLMLELLRYMDEEEIQELLQRVKEALKKILEIARQLEKIARRVDDPELLTEILFLVAELLVRVAQLMLELLRYMDEEEIQELLQRVKEALKKILEIARQLEKIARRVDDPELLTEILFLVAELLVRVAQLMLELLRYMDEEEIQELLQRVKEALKKILEIARQLEKIARRVDDPQKRIEIEYLVQQLKYEVERLMLELLR

SEQ ID NO: 916 - protein, 250 aa, synthetic construct
  REGION 1..250: note = Synthetic
SEEHEELLRVLQLVLEILFLAHESGDEESFRLAQEMLEQIRRLLQTYLETGDERAVEELRKIFELLLVVQLVLKILLLARESGDEESIRLAQEMLEQIIRLIQTYEETGDERAVEELRKIFELLLVVQLVLEILKQAKQSGDEESIRLAQEMLEQIIRLIQTYEETGDERAVEELRKIFELLLVVQLVLEILKQAKQSGDEESIRLAQEMLEQIIRLIQTYEETGDERAVEELRKIFRELLRVLSELELS

SEQ ID NO: 917 - protein, 244 aa, synthetic construct
  REGION 1..244: note = Synthetic
DILEEVLKLIHRAEELLERLAKSSDPEHQKLAQLLREIVERAEEAYRLGDLEKAKQMSILIKVARLITEALELLQRLAKSSDPEHQKLAQLLREIVERAYEAVALGDLEKAKQMSILIKVARLITEALELLQRLAKSSDPEHQKLAQLLREIVERAYEAVALGDLEKAKQMSILIKVARLITEALELLQRLAKSSDPRHQQLAELLRQLVEEAYEAVALGDLEKARHMSRLIRTALQFTRILES

SEQ ID NO: 918 - protein, 253 aa, synthetic construct
  REGION 1..253: note = Synthetic
DRIEEALLLVIYAIILAEIISEQMEQQGDEESYKNVKELIEILLRLYQQLRRSPSEKYARILLAVATVVLAILEALRISSEMEQQGDEESYKNVKELIEILLRLLQQLERSPSEKYARILLAVATVVLAILEALRISSEMEQQGDEESYKNVKELIEILLRLLQQLERSPSEKYARILLAVATVVLAILEALRISSEMEQQGDEESYKNVKELIEILLRLLQQLERSPSEKYARILLHEAEQVKTILRQLELS

SEQ ID NO: 919 - protein, 250 aa, synthetic construct
  REGION 1..250: note = Synthetic
DELIQEALELIVRVRLTLKRLQKKLSEEEFREFLEMVKRAWQTLVQAIQSGDKESIELAIQILKALLLILLVLETLKRLQKKLSEEEFREFLEMVKRAWQTLVQAIQSGDKESIELAIQILKALLLILLVLETLKRLQKKLSEEEFREFLEMVKRAWQTLVQAIQSGDKESIELAIQILKALLLILLVLETLKRLQKKLSEEEFREFLEMVKRAWQTLVQAIQSGDKESIREAIELLEHLLYELRVLERH

SEQ ID NO: 920 - protein, 250 aa, synthetic construct
  REGION 1..250: note = Synthetic
DLEIRRLLIRLEAYARLVVLLAEHTGDEKALEIARQLLQKALELYQNQEKIDPEELEKLLRILLLLIRLIISAIEVIEDAERTGDEKALEIARQLLQKALELTQNQEKIDPRELEKLLRILLLLIRLIISAIEVIERAKETGDEKALEIARQLLQKALELTQNQEKIDPFELENLLRILLLLIRLIISAIEVIERAKETGDEKALEIARQLLQKALELTQNQEKIDPRELLELLYQLLLRIEQIIREIER

SEQ ID NO: 921 - protein, 250 aa, synthetic construct
  REGION 1..250: note = Synthetic
DERISELLIELRSFAQHVEHKAERTGDEKALEIARQLLQKALELTQNQEKIDPEELEKLLRILLLLIRLIISAIEVIERAKETGDEKALEIARQLLQKALELTQNQEKIDPEELEKLLRILLLLIRLIISAIEVIERAKETGDEKALEIARQLLQKALELTQNQEKIDPEELEKLLRILLLLIRLIISAIEVIERAKETGDEKALEIARQLLQKALELTQNQEKIDPKELELLLFELLLRIEIIILRIEL

SEQ ID NO: 922 - protein, 250 aa, synthetic construct
  REGION 1..250: note = Synthetic
DHRIEQLLKELHVSAELVIRSAKETGDEKALEIARQLLQKALELTQNQEKIDPEELEKLLRILLLLIELIISAIEVIERAKETGDEKALEIARQLLQKALELTQNQEKIDPRELERLLRILLLLIRLIISAIEVIERAKETGDEKALEIARQLLQKALELTQNQEKIDPLELERLLRILLLLIRLIISAIEVIERAKETGDEKALEIARQLLQKALELTQNQEKIDPSELLKLLEELLFRIEQIIHAIES

SEQ ID NO: 923 - protein, 250 aa, synthetic construct
  REGION 1..250: note = Synthetic
DDIAHEVRAIVFRIEKFALRIRKQGDEELARQISELARRILEFISKALQAGDKEKLEMARLAVIVVLLVAEIIEFALRIRKQGDEELARQISELARRIAEFISKALQAGDKEKLEMALLAVIVVLLVAEIIEFALRIRKQGDEELARQISELARRIAEFISKALQAGDKEKLEMALLAVIVVLLVAEIIEFALRIRKQGDEELARQISELARRIAEFISKALQAGDKKKLEEARLLVLEVLVKAQKIEFS

SEQ ID NO: 924 - protein, 265 aa, synthetic construct
  REGION 1..265: note = Synthetic
DELYIHAHRLLFEAKLYARELLKSSNEEDQELAKKILEELRQLFERLVKVLRNGDPEQVRLMLLFVEALLLLAQATKYAQELLKSSNEEDQELAKKILEELRQLFERLVKVLRNGDPEQVRLMLLFVEALLLLAQATKYAQELLKSSNEEDQELAKKILEELRQLFERLVKVLRNGDPRQVRLMLLFVEALLLLAQATKYAQELLKSSNEEDQEDAKKILEELRQLFERLVKVLRNGDPRQVQRMLLHVLLLLLFAEEIKKLIES

SEQ ID NO: 925 - protein, 270 aa, synthetic construct
  REGION 1..270: note = Synthetic
DVRIEKAIATAKLAIAILNYFAQEAGDEESLEEIRQNIEKLRRLMQEAIELSQQGNYEEATLVIRIIIAIATALLAIVTLLLFAKEAGDEESLEEILQNIEKLKRLMQEAIELSQQGNYEEATLVIRIIIAIATALLAIVTLLRFAKLAGDEESLEEILQNIEKLKRLMQEAIELSQQGNYEEATLVIRIIIAIALALLAIVELLKFAKEAGDEESLEEILQNIEKLKRLMQEAIELSQQGNYEEATLVIRIILRIANKLLNLVHELLFS

SEQ ID NO: 926 - protein, 253 aa, synthetic construct
  REGION 1..253: note = Synthetic
DKFERLLTEIHYAILKAESILEETKKAGDEELFEEIQRLVQTMIELFRRVRESGDPETVKFAWLLAQIALAILEALQILEETKKAGDEELFEEIQRLVQTMIELWRRVKESGDPETVKFAWLLAQIALAILEALQILEETKKAGDEELFEEIQRLVQTMIELWRRVKESGDPETVKFAWLLAQIALAILEALQILEETKKAGDEELFEEIQRLVQTMIELWRRVKESGDPETVREAFLFARLALYILRLLQEL

SEQ ID NO: 927 - protein, 253 aa, synthetic construct
  REGION 1..253: note = Synthetic
SEFSELLAQILTAIVRALEILRETKKAGDEELFEEIQRLVQTMIELFRRVEESGDPETVKFAWLLAQIALAILEALQILEETKKAGDEELFEEIQRLVQTMIELWRRVKESGDPETVKFAWLLAQIALAILEALQILEETKKAGDEELFEEIQRLVQTMIELWRRVKESGDPETVKFAWLLAQIALAILEALQILEETKKAGDEELFEEIQRLVQTMIELWRRVKESGDPETVKFAWRQAKLALEQLRFLQNQ

SEQ ID NO: 928 - protein, 271 aa, synthetic construct
  REGION 1..271: note = Synthetic
DNQMHALLYYARVLALIALRVVEIAQRYGDEELLKLAKELIRLAEESLRRVEELAQKLEDPEKLMEALLWIALVLAIIALILVLIAQQTGDEETLKEAKELIRKAEEYLRRVEELAQKLEDPEKLMEALLWIALVLAIIALILVLIAQQTGDEETLKEAKELIRKAEEYLRRVEELAQKLEDPEKLMEALLWIALVLAIIALILVLIAQQTGDEETLKEAKELIRKAEEYLRRVEELARKLEDPRLLSRALQIIREVREIIALILVLIAQQ

SEQ ID NO: 929 - protein, 271 aa, synthetic construct
  REGION 1..271: note = Synthetic
DDEMQILLLQALTVALYALELVLIAQQTGDEETLKRAKRIIKHAEELLRRVEELAQKLEDPEKLMEALLWIALVLAIIALILVLIAQQTGDEETLKEAKELIRKAEEYLRRVEELAQKLEDPEKLMEALLWIALVLAIIALILVLIAQQTGDEETLKEAKELIRKAEEYLRRVEELAQKLEDPEKLMEALLWIALVLAIIALILVLIAQQTGDEETLKEAKELIRKAEEYLRRVEELAQKLEDPRLLAHALRVILEVRRLIELILVLIAQQ

SEQ ID NO: 930 - protein, 270 aa, synthetic construct
  REGION 1..270: note = Synthetic
SIEIEYLLQLAHFLAILAHQLAQYARRHGDERTFEQVKEVLQEVKEILEQAKELAKKLDDPRDIIEMLLQIALVLALLAHVLAVLARTTGDERTFEEVKETLQEVKEILEQAKELAKKLDDPRDIIEMLLQIALVLALLAHVLAVLARTTGDERTFEEVKETLQEVKEILEQAKELAKKLDDPRDIIEMLLQIALVLALLAHVLAVLARTTGDERTFEEVKETLQEVKEILEQAKELAKKLDDPRDKFRMLIFILEVELLLREVEEVLAR

SEQ ID NO: 931 - protein, 270 aa, synthetic construct
  REGION 1..270: note = Synthetic
REEIELLLELAHDLAIAAHTAAKLALQTGDERTFELVKHLLQHVKEILERAKELAKKLDDPRDIIEMLLQIALVLALLAHVLAVLARTTGDERTFEEVKETLQEVKEILEQAKELAKKLDDPRDIIEMLLQIALVLALLAHVLAVLARTTGDERTFEEVKETLQEVKEILEQAKELAKKLDDPRDIIEMLLQIALVLALLAHVLAVLARTTGDERTFEEVKETLQEVKEILEQAEELAKKLDDPRDKIRMLLLIAEVLELVDHVLAVLAR

SEQ ID NO: 932 - protein, 270 aa, synthetic construct
  REGION 1..270: note = Synthetic
REEIEHLLLKAEALAYHALVLAELARRQGDERIFEEVKETLQEVKEILEQAKELAKKLDDPRDIIEMLLQIALVLALLAHVLAVLARTTGDERTFEEVKETLQEVKEILEQAKELAKKLDDPRDIIEMLLQIALVLALLAHVLAVLARTTGDERTFEEVKETLQEVKEILEQAKELAKKLDDPRDIIEMLLQIALVLALLAHVLAVLARTTGDERTFEEVKETLQEVKEILEQAKELAKKLDDPRDIERMREQILEVLLLVYEVELILEH

SEQ ID NO: 933 - protein, 298 aa, synthetic construct
  REGION 1..298: note = Synthetic
SKLLTHAHLLAHLAHTLARFAEHLLELGDKEEAKEVLQLVREIAERAERLIQEVIEIARKSEDPKELMQVLLWAALVLALIALILALVAEILLKAGDKEKAKEILQQVRELAERAERLIQEVIEIARKSEDPKELMQVLLWAALVLALIALILALVAEILLKAGDKEKAKEILQQVRELAERAERLIQEVIEIARKSEDPKELMQVLLWAALVLALIALILALVAEILLKAGDKEKAKEILQQVRELAERAERLIQEVIEIARKSEDPHEELRVLRVALEVLRLIVEIRQLVQEILEK

SEQ ID NO: 934 - protein, 250 aa, synthetic construct
  REGION 1..250: note = Synthetic
DELAREVRLIVSQIELLAHRIRQQGDEELARQISELARRIAEFISKALQAGDKEKLEMALLAVIVVLLVAEIIEFALRIRKQGDEELARQISELARRIAEFISKALQAGDKEKLEMALLAVIVVLLVAEIIEFALRIRKQGDEELARQISELARRIAEFISKALQAGDKEKLEMALLAVIVVLLVAEIIEFALRIRKQGDEELARQISELARRIAEFISKALQAGDKRKLHHAYLLVLEVLLRAIKIELS

SEQ ID NO: 935 - protein, 298 aa, synthetic construct
  REGION 1..298: note = Synthetic
SELLVEALALAVQALVLAELAEEYLKEGDKETAKRILELVREVAERAERLIQEVIEIARKSEDPKELMRVLLFAALVLALIALILALVAEILLKAGDKEKAKEILQQVRELAERAERLIQEVIEIARKSEDPKELMQVLLWAALVLALIALILALVAEILLKAGDKEKAKEILQQVRELAERAERLIQEVIEIARKSEDPKELMQVLLWAALVLALIALILALVAEILLKAGDKEKAKEILQQVRELAERAERLIQEVIEIARKSEDPREERQVQRWALRVRTLIEEILLEVEHILRS

SEQ ID NO: 936 - protein, 246 aa, synthetic construct
  REGION 1..246: note = Synthetic
DEEEILFFRAELLVEQLELLARLAGDEEILEFARQVSQKIKELLELLEQGDPQALRELKQLIDFLRAMILVVELLLLAKRAGDEEILEFARQVSQKIKELLELLEQGDPQALRELKNLIDFLRAMILVVELLLLAKEAGDEEILEFARQVSQKIKELLELLEQGDPRALELLHELILFLRAMILVVELLLLAKEAGDEEILEFARQVSQKIKELLELLEQGDPRALRLLNELINELQHMIFHVLNL

SEQ ID NO: 937 - protein, 246 aa, synthetic construct
  REGION 1..246: note = Synthetic
SREEILFEIAKNLVNILRQLAKLAGDEEILEFARQVSQKIKELLELLEQGDPQALRELEQLIDFLRAMILVVELLLLAYLAGDEEILEFARQVSQKIKELLELLEQGDPQAHRELQLLIHFLRAMILVVELLLLAKKAGDEEILEFARQVSQKIKELLELLEQGDPRALRLLFNLILFLEAMILVVRLLLLAKEAGDEEILEFARQVSQKIKELLELLEQGDPQALKLLLELIYELLRMIQKVLEL

SEQ ID NO: 938 - protein, 234 aa, synthetic construct
  REGION 1..234: note = Synthetic
DEIRELVLEALAFLHQAHYIAKELGDEELLELIKELIKFLEEMIRQGSPEAQQRLEIIVLVAIAVFFLIEAYYLAKQLGDEELLELIKELIKFLREMQRQGSPEAQQRLEIIVLVAIAVFFLIRAYRLAKRLGDEELLELIKELIKFLREMQRQGSPEAQQRLKIIVLVAEAVFFLIQAYELAKRLGDEELLELIKELIKFLREMQRQGSPEAQRRLLEIVSQALALFFRIEVS

SEQ ID NO: 939 - protein, 193 aa, synthetic construct
  REGION 1..193: note = Synthetic
DEFTRALILVYKALLLVEDLGDEEASEIIKELERKIEKARKAGDLETAERLFLFLRALLMVIEALKLVQELGDEEASEIIKELLRKIIKALKAGDLETAERLFLFLRALLMVIEALQLVQELGDEEASEIIKELLRKIIKALKAGDLETAERLFLFLKKLLDVIRALIHVERLGDEELSEIIKENLREIIKAL

SEQ ID NO: 940 - protein, 220 aa, synthetic construct
  REGION 1..220: note = Synthetic
DKQEWWFHSAYLLLVEAYRLAEEMGDEELLEIIRRLIERVIEAERLTRKTGDPEAREIIKQMWWFASAVLLLLQAYHYAQQMGDEELLEIIRRLIERVIEAVRLTEKTGDPEAREIIKQMWWFASAVLLLLQAYRYAQEMGDEELLEIIRRLIERVIEAVRLTEKTGDPEAREIIKQMWWFAHRVLSLLQLYKRAQEDGDEELLRTIRHLIERVIEAVRL

SEQ ID NO: 941 - protein, 222 aa, synthetic construct
  REGION 1..222: note = Synthetic
SELEQLLLRALILVIEVRERARQAGDEEVYELAKKAEEEIKQIQERGDEEEIRLLILLLQALLLVIEVLEQARQAGDEEVYELAKKAMEEIKQIQERGDEEEIRLLILLLQALLLVIEVLEQARQAGDEEVYELAKKAMEEIKQIQERGDEEEIRLLILLLQALLLVIEVLEQARQAGDEEVYELAKKAMEEIKQIQERGDEEQIEILIHFLHILRLEIQHS

SEQ ID NO: 942 - protein, 221 aa, synthetic construct
  REGION 1..221: note = Synthetic
SELERLAFRILQLVLEIKYLARLSGDERFSQLAKEAEERVKEIVERGDKEELELLLLALQIILLVLKILKLARLSGDERFSQLAKEAMERVKEIQERGDKEELELLLLALQIILLVLKILKLARLSGDERFSQLAKEAMERVKEIQERGDKEELELLLLALQIILLVLKILKLARLSGDERFSQLAKEAMERVKEIQERGDKEELRHLFYFLRILFLRLES

SEQ ID NO: 943 - protein, 221 aa, synthetic construct
  REGION 1..221: note = Synthetic
DELRELALKILELVLRIKFLAELSGDERFSQLAKEAEERVKEIQERGDKEELELLLLALQIILLVLKILRLARLSGDERFSQLAKEAMERVKEIQERGDKEELELLLLALQIILLVLKILKLARLSGDERFSQLAKEAMERVKEIQERGDKEELELLLLALQIILLVLKILKLARLSGDERFSQLAKEAMERVKEIQERGDKEELLELLHLLNLILQKLKS

SEQ ID NO: 944 - protein, 253 aa, synthetic construct
  REGION 1..253: note = Synthetic
DRELEQILEAIKLAYEVLYLARLLGDEEMTQLARELIEELHELFEEFVEDPNAEEALEKFRRIYQILSAIILAFKVLRQARELGDEEMTQLAKELIQELVELSREWQRDPNAEEALEKFRRIYQILSAIILAFEVLKQARELGDEEMTQLAKELIQELVELSREWQRDPNAEEALEKFRRIYQILSAIILAFEVLKQARELGDEEMTQLAKELIQELVELSREWQRDPNAEEALEKFREIYFHLYLLILRFEH

SEQ ID NO: 945 - protein, 225 aa, synthetic construct
  REGION 1..225: note = Synthetic
DELEQLASEVHVLVSRAEKYAKELGDPEIYEFAREIVRIATEALQRGDEKQLRLALLAVRVLLLVAQASKYAKELGDPEIYEFAREIVRIATEALQRGDEKQLRLALLAVRVLLLVAQASKYAKELGDPEIYEFAREIVRIATEALQRGDEKQLRLALLAVRVLLLVAQASKYAKELGDPEIYEFAREIVRIATEALQRGDEEQLRRARLLVLQLLLHAEESEFS

SEQ ID NO: 946 - protein, 254 aa, synthetic construct
  REGION 1..254: note = Synthetic
SELEVEAKQLAAEAQLLVEIVKRYARKHGDEELSELAKELLEKILEILQRFRETGDPQMLLQIKAVWLAVEAIALVAVVLEYARKHGDEELSELAKELLEKILEILQRFRETGDPQMLLQIKAVWLAVEAIALVAVVLEYARKHGDEELSELAKELLEKILEILQRFRETGDPQMLLQIKAVWLAVEAIALVAVVLEYARKHGDEELSELAKELLEKILEILQRFRETGDPQMLRLIEEVFLKVKFIAEHAEIS

SEQ ID NO: 947 - protein, 254 aa, synthetic construct
  REGION 1..254: note = Synthetic
DELEFQARLLAHEAEELVHIVRKYARKHGDEELSELAKELLEKILEILQRFRETGDPQMLLQIKAVWLAVEAIALVAVVLEYARKHGDEELSELAKELLEKILEILQRFRETGDPQMLLQIKAVWLAVEAIALVAVVLEYARKHGDEELSELAKELLEKILEILQRFRETGDPQMLLQIEAVWLAVEAIALVAVVLEYARKHGDEELSELAKELLEKILEILQRFRETGDPQMLRLIYEVFFLVLSIAFLAVFN

SEQ ID NO: 948 - protein, 254 aa, synthetic construct
  REGION 1..254: note = Synthetic
SELEIHAEELANQAHALVLNVESFARRHGDEELSELAKELLEKILEILQRFRETGDPQMLLQIKAVWLAVEAIALVALVLHIARLHGDEELSELAKELLEKILEILQRFRETGDPQMLRQIEAVWLAVEAIALVALVLLFARKHGDEELSELAKELLEKILEILQRFRETGDPQMLLQIYAVWLAVEAIALVAVVLEYARKHGDEELSELAKELLEKILEILQRFRETGDPQMLEQIYEVFLRVLLIAHQAVVL

SEQ ID NO: 949 - protein, 250 aa, synthetic construct
  REGION 1..250: note = Synthetic
DEELEEILRAFELATNVYFLAELAGDEEILQSVREILERIRRAVRTLRETGDPKAREEIKELMEILSALLYALLVYHLAKEAGDEEILQSVREIIERILRAIQTLKETGDPKAREEIKELMEILSALLYALLVFHQARRAGDEEILQSVREIIERILRAIQTLKETGDPKAREEIKELMEILSALLYALQVYILAKKAGDEEILQSVREIIERILRAIQTLKETGDPKAREEIHKLLLILLELLYHLQHS

SEQ ID NO: 950 - protein, 234 aa, synthetic construct
  REGION 1..234: note = Synthetic
DEQEELNVEIHLIVLRLQRLAKEAGDEEAFKLAQRLLELLKEAMNGPPEEMKRLLEQLLLNAEILLIVLLLLKLAQEAGDEEAFKLAQRLLELLKEAMNGPPEEMKRLLEQLLLNAEILLIVLLLLKLAQEAGDEEAFKLAQRLLELLKEAMNGPPEEMKRLLEQLLLNAEILLIVLLLLKLAQEAGDEEAFKLAQRLLELLKEAMNGPPEEMRRLLHHLFAEAIRLYYRLRAS

SEQ ID NO: 951 - protein, 219 aa, synthetic construct
  REGION 1..219: note = Synthetic
TERELEILILLLEVLRVAERAGDEEIFQLAQELRQLIKEAKERGDFELMERVLRIVQILLTLAKVLLTAKEAGDEEIFQLAQELAQLIKEAKERGDFELMERVLRIVQILLTLAKVLLTAKEAGDEEIFQLAQELAQLIKEAKERGDFELMERVLRIVQILLTLAKVLLTAKEAGDEEIFQLAQELAQLIKEAKERGDFELMERVLRIVRHLLYLARSL

SEQ ID NO: 952 - protein, 219 aa, synthetic construct
  REGION 1..219: note = Synthetic
SHREEKIKSLLYQVRLVAHLAGDEEIFQLAQELAQLIKEAKERGDFELMERVLRIVQILLTLAKVLLTALEAGDEEIFQLAQELAQLIKEAKERGDFELMERVLFIVEILLTLAKVLLTAKEAGDEEIFQLAQELAQLIKEAKERGDQELMHRVLFIVQILLTLAKVLLTAKEAGDEEIFQLAQELAQLIKEAKERGDEELMQRVLAKVVELLNRARQS

SEQ ID NO: 953 - protein, 250 aa, synthetic construct
  REGION 1..250: note = Synthetic
DEEEHEFLHVLQLALEVHRLIRELGDETLRRIVQFIEQLIQKAIELYEAGDIEEAKEYLRIASEIAKVALLAAEVLRLIQELGDETLRRIVQFIMQLIQKAIELYEAGDIEEAKEYLRIASEIAKVALLAAEVLRLIQELGDETLRRIVQFIMQLIQKAIELYEAGDIEEAKEYLRIASEIAKVALLAAEVLRLIQELGDETLRRIVQFIMQLIQKAIELYEAGDIEEAKEYLREASVLAFIALYRAEQL

SEQ ID NO: 954 - protein, 250 aa, synthetic construct
  REGION 1..250: note = Synthetic
SELEELEIQVNVAANQARTLYRDLGSEELREIVQSVMELLLQAIEFLELGNVEEAEQLLRLALEIAKVLLSAAEAFLLYRVLGSEELREIVQSVMELLLQAIEFLELGNVEEAEQLLRLALEIAKVLISAARAFRLYKKLGSEELREIVQSVMELLLQAIEFLELGNVREAERLLLLALLIAKVLISAARAFELYKKLGSEELREIVQSVMELLLQAIEFLELGNVEEALELLQQALIIAELLIFLAHEF

SEQ ID NO: 955 - protein, 250 aa, synthetic construct
  REGION 1..250: note = Synthetic
DRLEKEEIKVEIHAREAEHLYKHLGSEELREIVQSVMELLLQAIEFLELGNVEEAEQLLRLALEIAKVLISAARAFELYKKLGSEELREIVQSVMELLLQAIEFLELGNVEEAEQLLRLALEIAKVLISAARAFELYKKLGSEELREIVQSVMELLLQAIEFLELGNVEEAEELLRLALLIARVLISAARAFELYKKLGSEELREIVQSVMELLLQAIEFLELGNREEAYRLLLRALIEAIYLIHLAEHL

SEQ ID NO: 956 - protein, 222 aa, synthetic construct
  REGION 1..222: note = Synthetic
LRVALLAHRVRLIIKRIEAVAQTAGDEELEEMAKQVAQFILEVLKAGNEENLRVALLAALVLLIIAFIIEYARKAGDEELEEMAKQVAQFILEVLKAGNEENLRVALLAALVLLIIARIIEYARKAGDEELEEMAKQVAQFILEVLKAGNEENLRVALLAALVLLIIARIIEFARKAGDEELEEMAKQVAQFILEVLKAGNERLLRRARSIATHLLVLAQES

SEQ ID NO: 957 - protein, 250 aa, synthetic construct
  REGION 1..250: note = Synthetic
DELEEEELKVERAASDARVLYRFLGSEELREIVQSVMELLLQAIEFLELGNVEEAEQLLRLALEIAKVLISAAEAFLLYRKLGSEELREIVQSVMELLLQAIEFLELGNVEEAEQLLRLALEIAKVLISAARAFELYKKLGSEELREIVQSVMELLLQAIEFLELGNVEEAEQLLRLALLIAEVLISAARAFELYKKLGSEELREIVQSVMELLLQAIEFLELGNVQEALQLLIEAYVLAVRLILQAEYF

SEQ ID NO: 958 - protein, 231 aa, synthetic construct
  REGION 1..231: note = Synthetic
SEEESRAFYTVLRILELAKEMGDEESFRTAREFFRLLFEAVETGSPEAKQLIQELLEMLKALLTVLEILRLAKEMGDEESFRTAQEFLELLQRAKETGSPEAKQLIQELLEMLKALLTVLEILRLAKEMGDEESFRTAQEFLELLQRAKETGSPEAKQLIQELLEMLKALLTVLEILRLAKEMGDEESFRTAQEFLELLQRAKETGSPEAKQLIQELLRKLREILIRLEQN

SEQ ID NO: 959 - protein, 246 aa, synthetic construct
  REGION 1..246: note = Synthetic
SELEELILEAEHLILQVLLFARETGNEEAHEIAQRMLELVKKAEELHDVDREKAREIIQLVSLILKAILLILQVLLHARETGNEEAHEIAQRMLELVKKAEELHDVDREKARKIIRLVSLILKAILLILQVLKHARETGNEEAHEIAQRMLELVKKAEELHDVDEEKAREIIELVSLILKAILLILQVLKHARETGNEEAHEIAQRMLELVKKAEELHDVDREKALRIILIVSYLLKQILERLQEL

SEQ ID NO: 960 - protein, 221 aa, synthetic construct
  REGION 1..221: note = Synthetic
DELEELIYKIRQLILEAEFLAKQAGNEEAMEMVRQLIELVKKAKEAGDKETLELAILIIIIIILIVIALELARQAGNEEAMEMVRQLIELVKKAKEAGDKETLELAILIIIIIILIVIALELARQAGNEEAMEMVRQLIELVKKAKEAGDKETLELAILIIIIIILIVIALELARQAGNEEAMEMVRQLIELVKKAKEAGDKETLKQAELIILIIILEVRL

SEQ ID NO: 961 - protein, 233 aa, synthetic construct
  REGION 1..233: note = Synthetic
DEEREKVQKALVRLRLLMERVKEAGDEELLQLLREAFELLTQALREGDPQKLREALEWAKVASSLFELWKQMQEVKEAGDEELLQLLREAFELLTQALREGDPQKLREALEWAKVASSLFELWKQMQEVKEAGDEELLQLLREAFELLTQALREGDPQKLREALEWAKVASSLFELWKQMQEVKEAGDERLLQILREAFELLTQALREGDPQKLLEALLHAEFASQLFELWKQ

SEQ ID NO: 962 - protein, 285 aa, synthetic construct
  REGION 1..285: note = Synthetic
LKQELIRRKVIEILLYLYRVIRRLEYFSRETGDPEADEAWKQLVELIEELEQLFREVRERGDPEDLKQVLISAKVIYIIAFLLLVILRLLEISRKTGDPEADEAWKQLVELIEELIQLFREVQERGDPEDLKQVLISAKVIYIIAFLLLVILRLLEISRKTGDPEADEAWKQLVELIEELIQLFREVQERGDPEDLKQVLISAKVIYIIAFLLLVILRLLEISRKTGDPEADEAWKQLVELIEELIQLFREVQERGDPEDLKQVLISAEKIFIHARILLLRLELS

SEQ ID NO: 963 - protein, 251 aa, synthetic construct
  REGION 1..251: note = Synthetic
SELYLLVFEIILRIEYIILVLKLQGDEESAKKLEEILQQIIEELQRVRESGDPEELELILLLALVALIIAKIMLIITRLKQQGDEESAKKLEEILQQIIEELQRVRESGDPEELELILLLALVALIIAKIMLIITRLKQQGDEESAKKLEEILQQIIEELQRVRESGDPEELELILLLALVALIIAKIMLIITRLKQQGDEESAKKLEEILQQIIEELQRVRESGDPEELELILKKARSALLHAELLLEEH

SEQ ID NO: 964 - protein, 256 aa, synthetic construct
  REGION 1..256: note = Synthetic
SEIERLFRILLQLIVEIHFLAWQAKQMGDEEAFEEMRRLVEEAKRLLEQAKRSTDPEEIKILTLLAILLSLVVQILYYATQAKLMGDEEAFEEMRRLVEEAKRLLEQAKRSTDPEEIKILTLLAILLSLVVQILYYATQAKLMGDEEAFEEMRRLVEEAKRLLEQAKRSTDPEEIKILTLLAILLSLVVQILYYATQAKLMGDEEAFEHMRRLVEEAKRLLEQAKRSTDPKEILHLTLRAITLSHDVKLLFEEFES

SEQ ID NO: 965 - protein, 256 aa, synthetic construct
  REGION 1..256: note = Synthetic
DEIEELLRILSNLVHTIRNLARKAKLMGDEEAFEEMRRLVEEAKRLLEQAERSTDPEEIKILTLLAILLSLVVQILYYATQAKLMGDEEAFEEMRRLVEEAKRLLEQAKRSTDPEEIKILTLLAILLSLVVQILYYATQAKLMGDEEAFEEMRRLVEEAKRLLEQAKRSTDPEEIKILTLLAILLSLVVQILYYATQAKLMGDEHAFELMRETVERAKRLLEQAKRSTDPQRIRLLTLLAEALSTFVKELYRESQS

SEQ ID NO: 966 - protein, 256 aa, synthetic construct
  REGION 1..256: note = Synthetic
IKIETLLQILIELVIIIYRLALHAHHMGDEEAFEEMRRLVEEAERLLKQALRSTDPEEIKILTLLAILLSLVVQILYYATQAKLMGDEEAFEEMRRLVEEAKRLLEQAKRSTDPEEIKILTLLAILLSLVVQILYYATQAKLMGDEEAFEEMRRLVEEAKRLLEQAKRSTDPEEIKILTLLAILLSLVVQILYYATQAKLMGDEEAFEEMRRLVEEAKRLLEQAKRSTDPEEIKILTKLARRLSDNVKNLYKNFQL

SEQ ID NO: 967 - protein, 214 aa, synthetic construct
  REGION 1..214: note = Synthetic
DKLEQIQDEIKFLAQFALEQAKKAGDPEILEIVREILQRLREAGDDEETLKLALIQVEILLLAFEALLLAKKAGDPEILEIVREILQRLREAGDDEETLKLALIQVEILLLAFKALQMAKEAGDPEILEIVREILQRLREAGDDEHTLRLALLQVRILLLAFKALQMAKEAGDPEILEIVREILQRLREAGDDYRTLLEALRQVIFLLHEFEYS

SEQ ID NO: 968 - protein, 256 aa, synthetic construct
  REGION 1..256: note = Synthetic
DEIEELLEILLRLIIEILFLALQAEEMGDEEAFEEMRRLVEEARRLLQQAQRSTDPEEIKILTLLAILLSLVVQILYYATQAKLMGDEEAFEEMRRLVEEAKRLLEQAKRSTDPEEIKILTLLAILLSLVVQILYYATQAKLMGDEEAFEEMRRLVEEAKRLLEQAKRSTDPEEIKILTLLAILLSLVVQILYYATQAKLMGDEEAFERMRRLVEEAKRLLEQAKRSTDPEEIKRLTSEAEQLSYLVIVLYESFRR

SEQ ID NO: 969 - protein, 285 aa, synthetic construct
  REGION 1..285: note = Synthetic
SLVDRALLLLYKAIFLLEYVARLISQFYKETGDPLAQELTELVREAIELALEAARQLENNPGEEYFLVAVAIALLIEAIAELIFVALEISQFYKETGDPLAQELTELVREAIELALEAARQLANNPGEEYFLVAVAIALLILAIAELIHVALLISQFYKETGDPLAQELTELVREAIELALEAARQLANNPGEEYFLVAFAIALLILAIAELIKVALEISQFYKETGDPLAQELTELVREAIELALEAARQLANNPGEEYYKHAVRVAREILSIATEIKIALLES

SEQ ID NO: 970 - protein, 227 aa, synthetic construct
  REGION 1..227: note = Synthetic
DHELRHVLLLILQHILDIERSLHEAKQQGDEELLREMRENAQLAKELFEEVRRATDPREVQLLLVLVQILWYIIEILKSLYEAKQQGDEELLREMRENAQLAKELFEEVRRATDPREVQLLLVLVQILWYIIEILKSLYEAKQQGDEELLREMRENAQLAKELFEEVRRATDPREVQLLLVLVQILWYIIEILKSLYEAKQQGDEELLHFLRQQAELAKRLFEYVRS

SEQ ID NO: 971 - protein, 227 aa, synthetic construct
  REGION 1..227: note = Synthetic
DEELDRVLLLILYHILNIEHSLKEAKQQGDEELLREMRENAQLAKELFEEVRRATDPREVQLLLVLVQILWYIIEILKSLYEAKQQGDEELLREMRENAQLAKELFEEVRRATDPREVQLLLVLVQILWYIIEILKSLYEAKQQGDEELLREMRENAQLAKELFEEVRRATDPREVEELLRLVQILWLIIEILKELYEAKQLGDERLLRSLRRAAEHAHRLFEIVRS

SEQ ID NO: 972 - protein, 227 aa, synthetic construct
  REGION 1..227: note = Synthetic
EVQLELVLEQIEHYIQHIEHSLREAKRQGDEELLREMRENAQLAKELFEEVRRATDPREVQLLLVLVQILWYIIEILKSLYEAKQQGDEELLREMRENAQLAKELFEEVRRATDPREVQLLLVLVQILWYIIEILKSLYEAKQQGDEELLREMRENAQLAKELFEEVRRATDPREVRILLLLVEILWLIIRALKLLYEAKQLGDEKLLKALRRVAEHAKRAFEDVRS

SEQ ID NO: 973 - protein, 257 aa, synthetic construct
  REGION 1..257: note = Synthetic
EEKIEEALEQIHEAIRRAEKFIREAKEAGDEEFIRQMQELVEKIKRLFEEVRRATSEEEVKIALALVQIALAILKALQFILEAKEAGDEEFIRQMQELVEKIKRLFEEVRRATSEEEVKIALALVQIALAILKALQFILEAKEAGDEEFIRQMQELVEKIKRLFEEVRRATSEEEVKIALALVQIALAILKALQFILEAKEAGDEEFIRQMQELVEKIKRLFEEVRRATSERQVRIALLLVEIALILLESLRLRLED

SEQ ID NO: 974 - protein, 257 aa, synthetic construct
  REGION 1..257: note = Synthetic
DEKINEALILIRHALAIAEEFIFRAKEAGDEEFIRQMQELVEKIKRLFEEVRRATSEEEVKIALALVQIALAILKALQFILEAKEAGDEEFIRQMQELVEKIKRLFEEVRRATSEEEVKIALALVQIALAILKALQFILEAKEAGDEEFIRQMQELVEKIKRLFEEVRRATSEEEVKIALALVQIALAILKALQFILEAKEAGDEEFIRQMQELVEKIKRLFEEVRRATSEEEVKRALRLVRTALLILEVLKNRLES

SEQ ID NO: 975 - protein, 257 aa, synthetic construct
  REGION 1..257: note = Synthetic
EVKIRLALRQILKAISIALEFELRAEHAGDEEFIRQMQELVEKIRRLYEEVERATSEEEVKIALALVQIALAILKALQFILEAKEAGDEEFIRQMQELVEKIKRLFEEVRRATSEEEVKIALALVQIALAILKALQFILEAKEAGDEEFIRQMQELVEKIKRLFEEVRRATSEEEVKIALALVQIALAILKALQFILEAKEAGDEEFIRQMQELVEKIKRLFEEVRRATSEREVKHALTLVHIALLLLEILKLELEL

SEQ ID NO: 976 - protein, 257 aa, synthetic construct
  REGION 1..257: note = Synthetic
EVKIRLALEQISKAIAIALFFVFDAEEAGDEEFIRQMQELVEKIRRLFEEVKRATSEEEVKIALALVQIALAILKALQFILEAKEAGDEEFIRQMQELVEKIKRLFEEVRRATSEEEVKIALALVQIALAILKALQFILEAKEAGDEEFIRQMQELVEKIKRLFEEVRRATSEEEVKIALALVQIALAILKALQFILEAKEAGDEEFIRQMQELVEKIKRLFEEVRRATSDREVHHALHLVREALNRLQLLKIEFEL

SEQ ID NO: 977 - protein, 254 aa, synthetic construct
  REGION 1..254: note = Synthetic
LFREEVYRLLARIFSLIYEALIEAELMGDEETTEKIRRILEQVQEMIERARKSTTPEELFALLVFALLALIYIQILLALVKAQQMGDEETTEKIRRILEQVKEMLERAKKSTTPEELFALLVFALLALIYIQILLALVKAQQMGDEETTEKIRRILEQVKEMLERAKKSTTPEELFALLVFALLALIYIQILLALVKAQQMGDEETTEKIRRILEQVKEMLERAKKSTTPEELFALLKFARLALELIETLLQRV

SEQ ID NO: 978 - protein, 225 aa, synthetic construct
  REGION 1..225: note = Synthetic
DDLERLAALALASVAQIIFLYKQTGDPELREMVERARRLIEKAEESTDEETFRLLILAALALASVAQIIFLYKQTGDPELREMVERARRLIEKAEESTDKETFKLLILAALALASVAQIIFLYKQTGDPELREMVERARRLIEKAEESTDKETFKLLILAALALASVAQIIFLYKQTGDPILRLFVLIAVLLIEYAEESTDKRRFKLFIRTALSIALHAQELFES

SEQ ID NO: 979 - protein, 254 aa, synthetic construct
  REGION 1..254: note = Synthetic
SEFAREVYELIVKIILFAERLQDQFKEAGDEESTEKVQRMIEELQKVLERARKTTDPRELFAALVVAQIALIILLALWLQWQFKEAGDEESTEKVQRMIEELQKVLERAAKTTDPRELFAALVVAQIALIILLALWLQWQFKEAGDEESTEKVQRMIEELQKVLERAAKTTDPRELFAALVVAQIALIILLALWLQWQFKEAGDEESTEKVQRMIEELQKVLERAAKTTDPRELFAALKIARQALIYLRLLELH

SEQ ID NO: 980 - protein, 254 aa, synthetic construct
  REGION 1..254: note = Synthetic
SEFADEVYRIILRIIAFALELRYQFETAGDEESTEKVQRMIEELQKVLERARKTTDPRELFAALVVAQIALIILLALWLQWQFKEAGDEESTEKVQRMIEELQKVLERAAKTTDPRELFAALVVAQIALIILLALWLQWQFKEAGDEESTEKVQRMIEELQKVLERAAKTTDPRELFAALVVAQIALIILLALWLQWQFKEAGDEESTEKVQRMIEELQKVLERAAKTTDPRELFAALVVAQRAERFLRALHLS

SEQ ID NO: 981 - protein, 253 aa, synthetic construct
  REGION 1..253: note = Synthetic
DFAEHVFQFILEIFTQVRNVLQQMERAGDEEAFERIQRILEKIEEILERAEQSTDPEELFALYVVAFIAQIYIQVLQVQHQMKRAGDEEAFERIQRILEKIEEILERAKQSTDPEELFALYVVAFIAQIYIQVLQVQHQMKRAGDEEAFERIQRILEKIEEILERAKQSTDPEELFALYVVAFIAQIYIQVLQVQHQMKRAGDEEAFERIQRILEKIEEILERAKQSTDPEELFALHRIARRAEIFIELLLVH

SEQ ID NO: 982 - protein, 253 aa, synthetic construct
  REGION 1..253: note = Synthetic
DFALYVFRFIHEILDHVESVLRLMKEAGDEEAFERIQRILEKIEEILERAKQSTDPEELFALYVVAFIAQIYIQVLEVQHQMKRAGDEEAFERIQRILEKIEEILERAKQSTDPEELFALYVVAFIAQIYIQVLQVQHEMKRAGDEEAFERIQRILEKIEEILERAKQSTDPEELFALYVVAFIAQIYIQVLQVQHQMKRAGDEEAFERIQRILEKIEEILERAKQSTDPRELLELYEIAQKALIFIESLQIS

SEQ ID NO: 983 - protein, 253 aa, synthetic construct
  REGION 1..253: note = Synthetic
SFAEYVFRFISRIYHDVKLVQHLMKRAGDEEAFERIQRILEKIEEILERAKQSTDPEELFALYVVAFIAQIYIEVLRVQHEMKRAGDEEAFERIQRILEKIEEILERAKQSTDPEELFALYVVAFIAQIYIQVLQVQHQMKRAGDEEAFERIQRILEKIEEILERAKQSTDPRELFALYVVAFIAQIYIQVLQVQHQMKRAGDEEAFELIQRILEKIEEILERAKQSTDPEELVKLYIIATEALFFIRLLQER

SEQ ID NO: 984 - protein, 249 aa, synthetic construct
  REGION 1..249: note = Synthetic
DKIEEQFLKAFLLLLHIIHQAKRNGDEEITETAQRLLEKLQRMLERFEEGNPRAEEQAKITIQFVLAAVQLLRIIILAKRNGDEEITETAQRLLEKLQRMLERFEEGNPRAEEQAKITIQFVLAAVQLLRIIILAKQNGDEEITETAQRLLEKLQRMLERFEEGNPRAEEQAKITIQFVLAAVQLLRIIILAKQNGDEEITETAQRLLEKLQRMLERFEEGNPRAEEQAEETILHVLVLVYELELRIKS

SEQ ID NO: 985 - protein, 273 aa, synthetic construct
  REGION 1..273: note = Synthetic
SEDVRLIFKALRLALTVLELAEIIVQITGDYETEQHAKEILEKIEEMAQRIRQNGGDREVLQRLRILLLIVLALILALIVLLLALEIQEKTGDYETFQHAKEILEKIQEMAQRIEQNGGDREVLQRLRILLLIVLALILALIVLKLALEIQEKTGDYETFQHAKEILEKIQEMAQRIEQNGGDREVLQRLRILLLIVLALILALIVLKLALEIQEKTGDYETFQHAKEILEKIQEMAQRIEQNGGDREVLQRLRHLLRLVQELISHLRLLKES

SEQ ID NO: 986 - protein, 255 aa, synthetic construct
  REGION 1..255: note = Synthetic
DKVVEEIIIEALILILRVYLVAESLGDEEILRTAREMHELIRELLKQFERSTLDPELFQQLVVLLIIVEALLLILQVYQTAEELGDEEILRTAREMSELIKELLKQFKRSTLDPELFQQLVVLLIIVEALLLILQVYQTAEELGDEEILRTAREMSELIKELLKQFKRSTLDPELFQQLVVLLIIVRALLLILQVYQTAEELGDEEILRTAREMSELIKELLKQFKRSTLDPELRRQLIELFARVQYLLTRLRSS

SEQ ID NO: 987 - protein, 255 aa, synthetic construct
  REGION 1..255: note = Synthetic
DKDEVLAFAYYVLTLAEFALRRAKEAGDEEVYEIAREIIEQLKQQIEEMERTGDPRLLFLILVLLTAYLVLILALLALLLAKEAGDEEVYEIAREIIEQLKQQIEEMQRTGDPRLLYKILVLLTAYFVLIQALKALLLAKEAGDEEVYEIAREIIEQLKQQIEEMQRTGDPELLKKILILLYAYFVLIQALKALLLAKEAGDEEVYEIAREIIEQLKQQIEEMQRTGDPELLRRIFALLFEYFLLIERLITKLLS

SEQ ID NO: 988 - protein, 260 aa, synthetic construct
  REGION 1..260: note = Synthetic
ELLERMKNDLIRAEALLLLAYVSAFKAGDEELQQAVQFIVQEAIEILRELKETGDKEKAELLIRMVVLLAEAIFFLALAFLSAKRAGDEELQQAVQFIVQEAIEILRELKETGDKEKAELLIRMVVLLAEAIWFLALAFLSAKRAGDEELQQAVQFIVQEAIEILRELKETGDKEKAELLIRMVVLLAEAIWFLALAFLSAKRAGDEELQQAVQFIVQEAIEILRELKETGDKEKAEHLIRRVVLLAIQIFLEAERVLYS

SEQ ID NO: 989 - protein, 225 aa, synthetic construct
  REGION 1..225: note = Synthetic
DYLEILAQRARELVAQIIFLYKQTGDPELREMVERARRLIEKAEESTDEETFRLLILAALALASVAQIIFLYKQTGDPELREMVERARRLIEKAEESTDKETFKLLILAALALASVAQIIFLYKQTGDPELREMVERARRLIEKAEESTDKETFKLLILAALALASVAQIIFLYKQTGDPRLRLFVEVARELIERAEESTDKLEFEVLIDIAILVAESARLYFRS

SEQ ID NO: 990 - protein, 260 aa, synthetic construct
  REGION 1..260: note = Synthetic
DLLHHMKTRLLQAEVLLREAHESAKRAGDEELQQAVQFIVQEAIEILRELKETGDKEKAELLIRMVVLLAEAIWFLALAFLSAKRAGDEELQQAVQFIVQEAIEILRELKETGDKEKAELLIRMVVLLAEAIWFLALAFLSAKRAGDEELQQAVQFIVQEAIEILRELKETGDKEKAELLIRMVVLLAEAIWFLALAFLSAKRAGDEELQQAVQFIVQEAIEILRELKETGDHKKAYQLIYKVVLLAIEIFYEAEIFLKS

SEQ ID NO: 991 - protein, 251 aa, synthetic construct
  REGION 1..251: note = Synthetic
DFELLEEIFQVLSQAKILLELAQRAGNEEAQRLAREMIELVKQLLETLRKATSPEYERKIELLLEIIRVLVRAILLLLKAQQAGNEEAQRLAREMIELVKQLLETLEKATSPEYERKIELLLEIIRVLVLAIELLLKAQQAGNEEAQRLAREMIELVKQLLETLEKATSPEYERKIELLLEIIRVLVLAIELLLKAQQAGNEEAQRLAREMIELVKQLLETLEKATSPEYEEKILRLLYEIRYLVLAIEKL

SEQ ID NO: 992 - protein, 251 aa, synthetic construct
  REGION 1..251: note = Synthetic
SEELLEEILRVIAEAFTLLHRAEQAGNEEAQRLAREMQELVRQLLETLRKATSPEYERKIELLLEIIRVLVLAIKLLLDAQRAGNEEAQRLAREMIELVKQLLETLEKATSPEYERKIELLLEIIRVLVLAIELLLKAQRAGNEEAQRLAREMIELVKQLLETLEKATSPEYERKIELLLEIIRVLVLAIELLLKAQQAGNEEAQRLAREMIELVKQLLETLEKATSPEYERKIEELLKRIRTLVYHIEEH

SEQ ID NO: 993 - protein, 229 aa, synthetic construct
  REGION 1..229: note = Synthetic
DLQRELHHLLFRIVLLALLLEHQAKQAGDEEIFQTAREVMETARELLERIKRLKITPEQFLQIQLLILLLEIVVEALRLLLLAKQAGDEEIFQTAREVMETARELLERIKRLKITPEQFLQIQLLILLLEIVVEALRLLLLAKQAGDEEIFQTAREVMETARELLERIKRLKITPEQFLQIQELIRLLEIVVEALRFLLEAKQQGDERLFQNARQLMETARELLERIKR

SEQ ID NO: 994 - protein, 212 aa, synthetic construct
  REGION 1..212: note = Synthetic
DEEEEIRLLLEELEVSIRHVEELAQKAGDEEMKRLVQQARELAQEARELFEEAKQLDEEELQKFLEKVRIILTLALLLVEIIFVSIKAQKAGDEEMKRLVQQARELAQEARELFEEAKQLDEEELQKFLTKVRIILLLALLLVEIIKVSIMAQKAGDEEMKRLVQQARELAQEARELFEEAKQLDEEELQKFLKKVSEILAKAFHLVFLIKS

SEQ ID NO: 995 - protein, 198 aa, synthetic construct
  REGION 1..198: note = Synthetic
SSETIARILIRLMELLVELVLKLAKEEGDEEISRIAQEAYEILRKAYELLKRSTNPETLQTIFALILIAQMLLLVALVLLLAKQYGDEEISRIAQEAYEILRKAYELLKRSTNPETLQTIFALIYIARMLLLVAFVLLLAKDTGDEEISRIAQEAYEILRKAYELLKRSTNPETLETIFELILKATKLLFRAEIKLLL

SEQ ID NO: 996 - protein, 255 aa, synthetic construct
  REGION 1..255: note = Synthetic
DEIEELEILLRIAATALKLAILLALLLLTRTGDPEARELMELLKQLVQEVLEVLREAKQSGSPEDLEIAELIALLVLAAVQLILAALRALELYKRTGDPEARELMELLKQLVQEVLEVLREAKQSGSPEDLEIAELIALLVLAAVQLILAALRALELYKRTGDPEARELMELLKQLVQEVLEVLREAKQSGSPEDLEIAELIALLVLRAVHNIKIALFALSFLKEFGDPSARRLMEQLKEEVQEVLEVLREAKQS

SEQ ID NO: 997 - protein, 288 aa, synthetic construct
  REGION 1..288: note = Synthetic
SQTERVLHEVLKAILELEYAIDLARLLYERTGDPKAQEIFELMLEFIRLLSEIAKEVKQAGDEEYIQTLKVLVLVALAAAQLAIAILLASELYERTGDPKAQEIFELMLEFIRLLSEIAKEVKQAGDEEYIQTLKVLVLVALAAAQLAIAILLASELYERTGDPKAQEIFELMLEFIRLLSEIAKEVKQAGDEEYIQTLKVLVLVALAAALLAIAILLASELYERTGDPKAQEIFELMLEFIRLLSEIAKEVKQAGDEEYIKRLFRLVLEALSAAEQARNLLLQSESS

SEQ ID NO: 998 - protein, 269 aa, synthetic construct
  REGION 1..269: note = Synthetic
DTLEHRLRHLIYLLRSLLDRLRYEAQKRGDMEEIQRNREQIEQASEKAQRAIESGDPEDLKIATLVLRLVLLMLRLKLLLLELTEEAQKRGDMEEIQRNREQIEQASEKAQRAIESGDPEDLKIATLVLRLVLLMLRLKKLLLELTEEAQKRGDMEEIQRNREQIEQASEKAQRAIESGDPHDLKIATLVLRLVLLMLRLKKLLLELTEEAQKRGDMEEIQRNREQIEQASEKAQRAIESGDPQDLLEAFILLLQVLLELETQKEQLET

SEQ ID NO: 999 - protein, 269 aa, synthetic construct
  REGION 1..269: note = Synthetic
NELEHELRKLIHELELNLELLTREAQKRGDMEEIQRNREQIEQASEKAQRAIESGDPEDLKIATLVLRLVLLMLRLKYLLLELTEEAQKRGDMEEIQRNREQIEQASEKAQRAIESGDPHDLKIATLVLRLVLLMLRLKKLLLELTEEAQKRGDMEEIQRNREQIEQASEKAQRAIESGDPRDLHIATLVLRLVLLMLRLKKLLLELTEEAQKRGDMEEIQRNRERIEEASEVAQRAIESGDPHDLHRALAELRLVLLFLREKKELLRS

SEQ ID NO: 1000 - protein, 213 aa, synthetic construct
  REGION 1..213: note = Synthetic
DELEYLALIAELLARAAEILAGTDPELSELVKRILQKLKEAMQAGDKEKIELVMLAASAIFLAALALHLAGTDPELSELVKRILQKLKEAMQAGDKEKILLVVNAALAINLAALALVLAGTDPELSELVKRILQKLKEAMQAGDRRKILLVVLAALAIWLAASALHNAGTDPELSELVKRILQKLKEAMQAGDHEKILHVLNLANRIWHEALS

SEQ ID NO: 1001 - protein, 269 aa, synthetic construct
  REGION 1..269: note = Synthetic
ATLVERLYKLLLLLDYLFQELTHEAQKRGDMEEIQRNREQIEQASEKAQRAIESGDPEDLKIATLVLRLVLLMLRLKKLLLELTEEAQKRGDMEEIQRNREQIEQASEKAQRAIESGDPEDLKIATLVLRLVLLMLRLKKLLLELTEEAQKRGDMEEIQRNREQIEQASEKAQRAIESGDPEDLKIATLVLRLVLLMLRLKKLLLELTEEAQKRGDMEEIQRNREQIEQASEKAQRAIESGDPKDLLEARLLLLQVLLELELQLERLRA

SEQ ID NO: 1002 - protein, 269 aa, synthetic construct
  REGION 1..269: note = Synthetic
DTLEKRLDELRLRLLQLLRELTHEARKRGDMEEIQRNREQIEQASEKAQRAIESGDPEDLKIATLVLRLVLLMLRLKKLLLELTEEAQKRGDMEEIQRNREQIEQASEKAQRAIESGDPEDLKIATLVLRLVLLMLRLKKLLLELTEEAQKRGDMEEIQRNREQIEQASEKAQRAIESGDPEDLKIATLVLRLVLLMLRLKKLLLELTEEAQKRGDMEEIQRNREQIEQASEKAQRAIESGDPEDLKIATLVLKKVLRQLRLLKEQLEL

SEQ ID NO: 1003 - protein, 270 aa, synthetic construct
  REGION 1..270: note = Synthetic
DEKEQHARLLIQRIELLIKLLLRKAGTDEESQKLAQRLLEILKRLLEILIRAVEEGDPEKVELVLKMLQAVILIILIFLLIQELLEKAGTDEESQKLAQRLLEILKRLLEILIRAVEEGDPEKVELVLKMLQAVILIILIFLLIQELLEKAGTDEESQKLAQRLLEILKRLLEILIRAVEEGDPEKVELVLKMLQAVILIILIFLLIQELLEKAGTDEESQKLAQRLLEILKRLLEILIRAVEEGDPEKVERVLRLLEVVLNRIREFHLS

SEQ ID NO: 1004 - protein, 254 aa, synthetic construct
  REGION 1..254: note = Synthetic
DEIEKLLALLLLLMAKILEIAREIKKAGDEESYEQVRRIFEKIKELLQRAEETGDPRTLEIVWFLAQLAYLMVQILLIALEIKKAGDEESYEQVRRIFEKIKELLQRAEETGDPRTLEIVWFLAQLAYLMVQILLIALEIKKAGDEESYEQVRRIFEKIKELLQRAEETGDPRTLEIVWFLAQLAYLMVQILLIALEIKKAGDEESYEQVRRIFEKIKELLQRAEETGDPKYLREVFLQARVAFLQVEILLHRL

SEQ ID NO: 1005 - protein, 254 aa, synthetic construct
  REGION 1..254: note = Synthetic
DEIRHFLLLLEELLQKIKKIAEEIKRAGDEESYEQVRRIFEKIKELLQRAEETGDPRTLEIVWFLAQLAYLMVQILLIALEIKKAGDEESYEQVRRIFEKIKELLQRAEETGDPRTLEIVWFLAQLAYLMVQILLIALEIKKAGDEESYEQVRRIFEKIKELLQRAEETGDPRTLEIVWFLAQLAYLMVQILLIALEIKKAGDEESYEQVRRIFEKIKELLQRAEETGDPRTLEHVFRQARAAFLYVEALLLHS

SEQ ID NO: 1006 - protein, 257 aa, synthetic construct
  REGION 1..257: note = Synthetic
DDLEEIELRILQIFLQILEHAIRVQKLGDDESAEKIRELAERVKELAERAKQTGDPETAELMLILAQILLILVQILFYAVQVQKAGDDESAEKIRELAERVKELAERAKQTGDPETAELMLILAQILLILVQILFYAVQVQKAGDDESAEKIRELAERVKELAERAKQTGDPETAELMLILAQILLILVQILFYAVQVQKAGDDESAEKIRELAERVKELAERAKQTGDPYEARQLLFRALSLLTHVQLLFVRVERS

SEQ ID NO: 1007 - protein, 257 aa, synthetic construct
  REGION 1..257: note = Synthetic
DELEQIRIRIELIFFRIREYARQVQKAGDDESAEKIRELAERVKELAERAKQTGDPETAELMLILAQILLILVQILFYAVQVQKAGDDESAEKIRELAERVKELAERAKQTGDPETAELMLILAQILLILVQILFYAVQVQKAGDDESAEKIRELAERVKELAERAKQTGDPETAELMLILAQILLILVQILFYAVQVQKAGDDESAEKIRELAERVKELAERAKQTGDPYDARKNLLLALVLLTHVQQIFREVQVQ

SEQ ID NO: 1008 - protein, 257 aa, synthetic construct
  REGION 1..257: note = Synthetic
SELEQIHLLIRQIYLLILFYAYEVQRAGDDESAEKIRELAERVKELAERAKQTGDPETAELMLILAQILLILVQILFYAVQVQKAGDDESAEKIRELAERVKELAERAKQTGDPETAELMLILAQILLILVQILFYAVQVQKAGDDESAEKIRELAERVKELAERAKQTGDPETAELMLILAQILLILVQILFYAVQVQKAGDDESAEKIRELAERVKELAERAKQTGDPETAEKNLLLARLLLLEVQFLAHEVRIS

SEQ ID NO: 1009 - protein, 257 aa, synthetic construct
  REGION 1..257: note = Synthetic
SELEEIRFRIEEILTLIEHYAFEVQKAGDDESAEKIRELAERVKELAERAKQTGDPETAELMLILAQILLILVQILFYAVQVQKAGDDESAEKIRELAERVKELAERAKQTGDPETAELMLILAQILLILVQILFYAVQVQKAGDDESAEKIRELAERVKELAERAKQTGDPETAELMLILAQILLILVQILFYAVQVQKAGDDESAEKIREYAERVKELAERAKQTGDPETARRLLELAKALLHRVQALFFEVKVS

SEQ ID NO: 1010 - protein, 257 aa, synthetic construct
  REGION 1..257: note = Synthetic
DELEHIHLQILEIHLRILRYAIKVQRAGDDESAEKIRELAERVKELAERAKQTGDPETAELMLILAQILLILVQILFYAVQVQKAGDDESAEKIRELAERVKELAERAKQTGDPETAELMLILAQILLILVQILFYAVQVQKAGDDESAEKIRELAERVKELAERAKQTGDPETAELMLILAQILLILVQILFYAVQVQKAGDDESAEKIRELAERVKELAERAKQTGDPETAEEMLEEAKHLLLEVRRLFQAVQRQ

SEQ ID NO: 1011 - protein, 250 aa, synthetic construct
  REGION 1..250: note = Synthetic
DELFLEAHLILLLARLIAERTKKQGDLETARTLSELVRKAMEQLEEVRQAGDMEQLEEVLLFAIALLILARAYKIAQETKKQGDLETARTLSELVRKAMEQLEEVRQAGDMEQLEEVLLFAIALLILAQAYKIAQETKKQGDLETARTLSELVRKAMEQLEEVRQAGDKRQLQKVLVFAIALLILAQAYKIAQETKKQGDLETARTLSELVRKAMEQLEEVRQAGDYHQLQEVLAFAQVLLRLARFRKES

SEQ ID NO: 1012 - protein, 257 aa, synthetic construct
  REGION 1..257: note = Synthetic
AELERILLLIRQIFILILLYAYEVQRAGDDESAEKIRELAERVKELAERAKQTGDPETAELMLILAQILLILVQILFYAVQVQKAGDDESAEKIRELAERVKELAERAKQTGDPETAELMLILAQILLILVQILFYAVQVQKAGDDESAEKIRELAERVKELAERAKQTGDPETAELMLILAQILLILVQILFYAVQVQKAGDDESAEKIRELAERVKELAERAKQTGDPETAELMLILAERLLEYVKALFLEVRYS

SEQ ID NO: 1013 - protein, 257 aa, synthetic construct
  REGION 1..257: note = Synthetic
SELEEILYRIKEIFVRIELIATLVQLLGDDESAEKIRELAERVKELAERAKQTGDPETAELMLILAQILLILVQILFYAVQVQKAGDDESAEKIRELAERVKELAERAKQTGDPETAELMLILAQILLILVQILFYAVQVQKAGDDESAEKIRELAERVKELAERAKQTGDPETAELMLILAQILLILVQILFYAVQVQKAGDDESAEKIRELAERVKELAERAKQTGDPEYAYHALLLALSLLYHVQRLFEAVQVQ

SEQ ID NO: 1014 - protein, 257 aa, synthetic construct
  REGION 1..257: note = Synthetic
AELERILNEIFEIFLLIEIYAYHVQRAGDDESAEKIRELAERVKELAERAKQTGDPETAELMLILAQILLILVQILFYAVQVQKAGDDESAEKIRELAERVKELAERAKQTGDPETAELMLILAQILLILVQILFYAVQVQKAGDDESAEKIRELAERVKELAERAKQTGDPETARLMLILAQILLILVQILFYAVQVQKAGDDESAEKIRELAERVKELAERAKQTGDPRVALQNLVHALQLLLQVETIFLQVELS

SEQ ID NO: 1015 - protein, 282 aa, synthetic construct
  REGION 1..282: note = Synthetic
DRRLLQLIYRILELVLRVELLAHELRLEGNEESFEKAVEFVKQILELVRRAFEYFEAGKTEEAEKILRLALLMIQILLLVLQVYRLAVELQQQGNEESFEKAVEFVKQILELVRRAFEYFEAGKTEEAEKILRLALLMIQILLLVLQVYRLAVELQQQGNEESFEKAVEFVKQILELVRRAFEYFEAGKTEEAEKILRLALLMIQILLLVLQVYRLAVELQQQGNEESFEKAVEFVKQILELVRRAFEYFEAGKTEEAEKILRLALRLIEDLLLRLELLRNS

SEQ ID NO: 1016 - protein, 269 aa, synthetic construct
  REGION 1..269: note = Synthetic
DLLEQLIRIAKDLVTRVREIYILLKRLADDEEFLRRAEELLQLMLEILEKAIEATQRGDPKQVLLLILIAIAIWLVFEVLLIYILLKRLADDEEFLRRAEELLQLMLEILEKAIEATQRGDPKQVLLLILIAIAIWLVFEVLLIYILLKRLADDEEFLRRAEELLQLMLEILEKAIEATQRGDPKQVKLLILIAIAIWLVFEVLLIYILLKRRADDKRFLELAEELLQLMLEILEKAIEATQRGDPDLVSILINIALSIYFLFVLLLQS

SEQ ID NO: 1017 - protein, 236 aa, synthetic construct
  REGION 1..236: note = Synthetic
DELERFKLYILLILTEIRRLFRLAKERGDEEILESAKRMLEYAQRALQTVQEALENNDPELAELALFLALIVSILVLILELFLKAKERGDEEILESAKRMLEYAQRALQTVQEALENNDPELAELALFLALIVSILVLILELFLKAKERGDEEILESAKRMLEYAQRALQTVQEALENNDPKLAEKALLLARIVSHLVEILELFLRAKERGDEKLLELAKDLLETAQRALQFVQEL

SEQ ID NO: 1018 - protein, 236 aa, synthetic construct
  REGION 1..236: note = Synthetic
SELEEHKFLIQIILLLIHLLFLKAKQRGDEEILESAKRMLEYAQRALQTVQEALENNDPELAELALFLALIVSILVLILELFLKAKERGDEEILESAKRMLEYAQRALQTVQEALENNDPELAELALFLALIVSILVLILELFLKAKERGDEEILESAKRMLEYAQRALQTVQEALENNDPELAELALFLARIVSLLVRILELFLKAKERGDEDLERIAREALKSAQKLLQRVQEA

SEQ ID NO: 1019 - protein, 236 aa, synthetic construct
  REGION 1..236: note = Synthetic
DELERFYILIRHVLYLIESLFEEAELRGDEEILESAKRMLEYAQRALQTVQEALENNDPELAELALFLALIVSILVLILHLFLLAKDRGDEEILESAKRMLEYAQRALQTVQEALENNDPELAELALFLALIVSILVFILELFLKAKERGDEEILESAKRMLEYAQRALQTVQEALENNDPRLANRALLLALVVLILVYILEVYLYAKERGDEEFRHYAELLLETAQELLQVVQEL

SEQ ID NO: 1020 - protein, 236 aa, synthetic construct
  REGION 1..236: note = Synthetic
DELEQFKLLIEHILNLIKELFQQAELRGDEEILESAKRMLEYAQRALQTVQEALENNDPELAELALFLALIVSILVLILELFLKAKERGDEEILESAKRMLEYAQRALQTVQEALENNDPELAELALFLALIVSILVLILELFLKAKERGDEEILESAKRMLEYAQRALQTVQEALENNDPELAELALELAEIVSLLVEILELFLRAKERGDENLLHNAKRLLEHAQRLLQTVQEA

SEQ ID NO: 1021 - protein, 236 aa, synthetic construct
  REGION 1..236: note = Synthetic
SELEEFKKYIEFILTLIRLLFEDAKRRGDEEILESAKRMLEYAQRALQTVQEALENNDPELAELALFLALIVSILVLILRLFLKAKERGDEEILESAKRMLEYAQRALQTVQEALENNDPELAELALFLALIVSILVLILELFLKAKERGDEEILESAKRMLEYAQRALQTVQEALENNDPKAAFTALVLALIVELLVFILETFLRAKERGDEKLEKSARLLLKIAQELLEQVQRL

SEQ ID NO: 1022 - protein, 250 aa, synthetic construct
  REGION 1..250: note = Synthetic
DELFTRALVILFEARLLAEETKKQGDLETARTLSELVRKAMEQLEEVRQAGDMEQLEEVLLFAIALLILAQAYKIAQETKKQGDLETARTLSELVRKAMEQLEEVRQAGDMEQLEEVLLFAIALLILAQAYKIAQETKKQGDLETARTLSELVRKAMEQLEEVRQAGDMEQLREVLTFAIALLVLAQAYKIAQETKKQGDLETARTLSELVRKAMEQLEEVRQAGDRKQLQEVLEFAQRLLVEAESYKRS

SEQ ID NO: 1023 - protein, 238 aa, synthetic construct
  REGION 1..238: note = Synthetic
SEIFELVSRVLILADELRRQAKKTGDKEFSEQARELARRVEETLQRVSEEEALRTIQIYMLVLLVLLLALQLYEQAKKTGDKEFSEQARELARRVFETLQRVSEEEALRTIQIYMLVLLVLLLALQLYEQAKKTGDKEFSEQARELARRVFETLQRVSEEEALRTIQIYMLVLLVLLLALQLYEQAKKTGDKEFSEQARELARRVFETLQRVSEEEAERTIRRVYLILELLLRLLELS

SEQ ID NO: 1024 - protein, 324 aa, synthetic construct
  REGION 1..324: note = Synthetic
DWFEELILKLEHLYVLAVEILLRLKRKYERTGDPQLKEAWEQARQATKQIKELIERAKEAWQKFEETGDPSAKEEVWFVFLLAELLLLYLQAVEIMNRLKEKYERTGDPQLKEAWEQARQATKQIKELIERAKEAWQKFEETGDPSAKEEVWFVFLLAELLLLYLQAVEIMNRLKEKYERTGDPQLKEAWEQARQATKQIKELIERAKEAWQKFEETGDPSAKEEVWFVFLLAELLLLYLQAVEIMNRLKEKYERTGDPRLKEAWEFARQATKQIKELIERAKEAWQKFEETGDPSAKEEVWFVFLEAQKLLRQLESLLEYNEL

SEQ ID NO: 1025 - protein, 289 aa, synthetic construct
  REGION 1..289: note = Synthetic
DEREYEITRLATEARLIIRRIEKELKMAKTEEEFQHLLELLQQVLETYREARELSRKAKEAGDLELAVQAMEIVLLAVQAILTIAEIWKELKMAKTEEEFQHLLELLQQVLETYREARELSRKAKEAGDLELAVQAMEIVLLAVQAILTIAEIWKELKMAKTEEEFQHLLELLQQVLETYREARELSRKAKEAGDLELAVQAMEIVLLAVQAILTIAEIWKELKMAKTEEEFQHLLELLQRVLELYREAREISRKAKEAGDLEQAVRAMRIVLILVRAILFEAEVWKER

SEQ ID NO: 1026 - protein, 199 aa, synthetic construct
  REGION 1..199: note = Synthetic
KETDIQRAKTEIEELMQKLKRAGVPEEELIQQALRLAVLFAEEAGVDARELVKQVIIYIAQVLIEETMKELKRAGVPEEELIQQALRLAVLFAEEAGVDARELVKQVIIYIAQVLIEETMKELKRAGVPEEELIQQALRLAVLFAEEAGVDHRELVLEVILYIANVLIRETIRELLRAGVPDEELKRIAIRLFELFLRS

SEQ ID NO: 1027 - protein, 239 aa, synthetic construct
  REGION 1..239: note = Synthetic
DEQLERSRERIESLIQQVQRYATDEELARKVIQTAREYQERAEELQKLGNLEEILMLLQLALSFLLIILLIALVQRQATDEELARKVIQTAREYQERAEELQKLGNLEEILMLLQLALSFLLIILLIAKVQKFATDEELARKVIQTAREYQERAEELQKLGNLEEILMLLLLALSFLLIILLIALVQKFATDEELARKVIQTAREYQERAEELQKLGNLEEILHLLLQALLLLLLILLS

SEQ ID NO: 1028 - protein, 239 aa, synthetic construct
  REGION 1..239: note = Synthetic
DEQLRKLEALIRYLIQLVQEHATDEELARKVIQTAREYQERAEELQKLGNLEEILMLLQLALSFLLIIYLIALVQKFATDEELARKVIQTAREYQERAEELQKLGNLEEILMLLQLALSFLLIILLIALVQKFATDEELARKVIQTAREYQERAEELQKLGNLEEILMLLQLALSFLLIILLIALVQKFATDEEEARKVIQTAREYQERAEELQKLGNLEEILQLLRHALLLLEFILLL

SEQ ID NO: 1029 - protein, 268 aa, synthetic construct
  REGION 1..268: note = Synthetic
DELERLLLRIETIAREMEQIARRLLKSSDEEVQRSAREFQERLKQIVEQAKQAYEAGDPEKVKLALLLVLILLIALEMFYIAVELLKSSDEEVQRSAREFQERLKQIVEQAKQAYEAGDPEKVKLALLLVLILLIALEMFYIAVELLKSSDEEVQRSAREFQERLKQIVEQAKQAYEAGDPRKVKLALLLVLILLIALEMFYIAVELLKSSDEEVQRSAREFQERLKQIVEQAKQAYEAGDPRRVQQALLLVRLLLEELEEFYIAVEL

SEQ ID NO: 1030 - protein, 258 aa, synthetic construct
  REGION 1..258: note = Synthetic
DDELREHLYRIANHVRRLLRFLKRHSTDEESLQLAKELVEEVLELHKSARTSKDPEDMERALLLAQLAQIAIEVLLLLWFLKRHSTDEESLQLAKELVEEVLELWKSARTSKDPEDMERALLLAQLAQIAIEVLLLLWFLKRHSTDEESLQLAKELVEEVLELWKSARTSKDPEDMERALLLAQLAQIAIEVLLLLWFLKRHSTDEDSLRFAKQLVEIVLELWKSARTSKDPEDMEQALRRAKTALLLIKLLILLIRL

SEQ ID NO: 1031 - protein, 258 aa, synthetic construct
  REGION 1..258: note = Synthetic
DEELLQQLIEIALIVLHLLFQLYLKSTDEESLQLAKELVEEVEELLKSALRSKDPEDMERALLLAQLAQIAIEVLLLLWFLKRHSTDEESLQLAKELVEEVLELWKSARTSKDPEDMERALLLAQLAQIAIEVLLLLWFLKRHSTDEESLQLAKELVEEVLELWKSARTSKDPEDMERALLLAQLAQIAIEVLLLLWFLKRHSTDEQSLQSAKELVEEVLELWKSARTSKDPEDMERALLLAERASHRIKSLILYIRS

SEQ ID NO: 1032 - protein, 258 aa, synthetic construct
  REGION 1..258: note = Synthetic
DTELLLRLYEIAIRVTELLEFLKRHSTDEESLQLAKELVEEVLELHKSARTSKDPEDMERALLLAQLAQIAIEVLLLLWFLKRHSTDEESLQLAKELVEEVLELWKSARTSKDPEDMERALLLAQLAQIAIEVLLLLWFLKRHSTDEESLQLAKELVEEVLELWKSARTSKDPEDMERALLLAQLAQIAIEVLLLLWFLKRHSTDEESLQIAKRLVELVLELWKSARTSKDPQDMRRALLLAELAQRIIETLLRVIES

SEQ ID NO: 1033 - protein, 258 aa, synthetic construct
  REGION 1..258: note = Synthetic
DELLLRQLIRIASLVYELLLRLQLHSTDEESLQLAKELVEEVHELLQSALKSKDPEDMERALLLAQLAQIAIEVLLLLWFLKRHSTDEESLQLAKELVEEVLELWKSARTSKDPEDMERALLLAQLAQIAIEVLLLLWFLKRHSTDEESLQLAKELVEEVLELWKSARTSKDPEDMERALLLAQLAQIAIEVLLLLWFLKRHSTDERLLQQAKELVEEVLELWKSARTSKDPEDMERALRLAKAALILIKASILYIRL

SEQ ID NO: 1034 - protein, 219 aa, synthetic construct
  REGION 1..219: note = Synthetic
DEIYLEAYLIASAIEAIAELLGDPELWESAKRLKELLKEAERRGSDEDLQRVFIMVSAIYLAALILLIALLLGDPELWESAKRLLELLKEAERRGSDEDLQRVFIMVSAILLAAQILHIAKELGDPELWESAKRLLELLKEAERRGSDEDLQRVFLMVEAILLAAQILKIAKQLGDPELWESAKRLLELLKEAERRGSDEDLKHVFRLVLEVLVEARVL

SEQ ID NO: 1035 - protein, 281 aa, synthetic construct
  REGION 1..281: note = Synthetic
DELFHLFNQVRALIQILERLAQQLERLGNEELARKVKEMIRVVIELLERAIESLKQGSFEEAKKLLELAILIALVLLLIIRLVQLAQQLERLGNEELARKVKEMIRVVIELLERAIESLKQGSFEEAKKLLELAILIALVLILIIILVQLAQQLERLGNEELARKVKEMIRVVIELLERAIESLKQGSFREAKKLLELAILIALVLILIIILVQLAQQLERLGNEELARKVKEQIRRVIELLERAIESLKQGSFEEAYLLLVLALHLAKRLILEIIEVQRA

SEQ ID NO: 1036 - protein, 251 aa, synthetic construct
  REGION 1..251: note = Synthetic
SEELLHKLQQLLTEAQYLLREVERQGNYELLEKMKRIVEELEELLQRAQRAKTEEEIKQILLLAQLAFLLLQALLLLAEVRKQGNYELLEKMKRIVEELEELLQRAQRAKTEEEIKQILLLAQLAFLLLQALLLLAEVRKQGNYELLEKMKRIVEELEELLQRAQRAKTEEEIKQILLLAQLAFLLLQALLLLAEVRKQGNYELLELMKRIVEELEELLQRAQRAKTEEEIKQILREAEIAFKLLELLLEH

SEQ ID NO: 1037 - protein, 270 aa, synthetic construct
  REGION 1..270: note = Synthetic
DEEILRLLSEAERFVVAVRQLAREAGNEEVREIAQEAMETFKEFSQRLRESLKQGNLEELEKLARIILLLVEAAYYVLLVLILAKKAGNEEVREIAQEAMETFKEFSQRLRESLKQGNLEELEKLARIILLLVEAAYYVLLVLILAKQAGNEEVREIAQEAMETFKEFSQRLRESLKQGNLEELEKLARIILLLVEAAYYVLLVLILAKQAGNEEVREIAQEAMETFKEFSQRLRESLKQGNLEELERLARRILLLVQIAFLLLQHLIES

SEQ ID NO: 1038 - protein, 302 aa, synthetic construct
  REGION 1..302: note = Synthetic
SEEELNRLLELISRIFILVYEIFFRAEQAGMPEEILEDMEQLIEELRQLLEEAERAVEEYKRTGDEKYFSLAELIWLLAQILLILAQVLFIFAQAKKAGMPEEILEDMEQLIEELRQLLEEAKRAVEEYKRTGDEKYFSLAELIWLLAQILLILAQVLFIFAQAKKAGMPEEILEDMEQLIEELRQLLEEAKRAVEEYKRTGDEKYFSLAELIWLLAQILLILAQVLFIFAQAKKAGMPEEILEDMEQLIEELRQLLEEAKRAVEEYKRTGDEKYFSLAELIWLLAQKLLERAELLFLLAHS

SEQ ID NO: 1039 - protein, 302 aa, synthetic construct
  REGION 1..302: note = Synthetic
SEEHLNHLLLLILEILLRVEFIFTTAKEAGMPEEILEDMEQLIEELRQLYEEAKRAVEEYKRTGDEKYFSLAELIWLLAQILLILAQVLFIFALAKKAGMPEEILEDMEQLIEELRQLLEEAKRAVEEYKRTGDEKYFSLAELIWLLAQILLILAQVLFIFAQAKKAGMPEEILEDMEQLIEELRQLLEEAKRAVEEYKRTGDEKYFSLAELIWLLAQILLILAQVLFIFAQAKKAGMPERILEIMEQLIEELRQLLEEAKRAVEEYKRTGDEKYFKLALEITHRARVLLHTAEALFERAQS

SEQ ID NO: 1040 - protein, 302 aa, synthetic construct
  REGION 1..302: note = Synthetic
SEEELLRLLSEIYYIILIVELIFERAKKAGMPEEILEDMEQLIEELRQLLEEAKRAVEEYKRTGDEKYFSLAELIWLLAQILLILAIVLFIFAQAKKAGMPEEILEDMEQLIEELRQLLEEAKRAVEEYKRTGDEKYFSLAELIWLLAQILLILAQVLFIFAQAKKAGMPEEILEDMEQLIEELRQLLEEAKRAVEEYKRTGDEKYFSLAELIWLLAQILLILAQVLFIFAQAKKAGMPEEILEIMEQLIEELRQLLEEAKRAVEEYKRTGDKRYFHLARQIWRKAEDLLELAQELFIEAQS

SEQ ID NO: 1041 - protein, 254 aa, synthetic construct
  REGION 1..254: note = Synthetic
DQVEELLNQLRALFELLEILLQRSTDEESQETLREVLEHAQEIMKKAIRAGDPERASKLLQVALLILLLALLFVRLRRLLQNSTDEESQETLREVLEHAQEIMKKAIRAGDPERASKLLQVALLILLLAELFVRLRQLLQNSTDEESQETLREVLEHAQEIMKKAIRAGDPERARELLEVALLILLLAELFVRLRQLLQNSTDEESQEVLREVLEFAQEIMKKAIRAGDPRRALHLLHRALVNLKLAERYVRKR

SEQ ID NO: 1042 - protein, 254 aa, synthetic construct
  REGION 1..254: note = Synthetic
DQVEELLQLLYELFAILRSLLETSTDEESQETLREVLEHAQEIMKKAIRAGDPERASKLLQVALLILLLAILFVRLRLLLQRSTDEESQETLREVLEHAQEIMKKAIRAGDPERASKLLQVALLILLLAELFVRLRELLQNSTDEESQETLREVLEHAQEIMKKAIRAGDPERASKLLQVALLILLLAELFVRLRQLLQNSTDEESQETLREVLEHAQEIMKKAIRAGDPRRALHLLLEALLELLRARLHVELS

SEQ ID NO: 1043 - protein, 274 aa, synthetic construct
  REGION 1..274: note = Synthetic
LEEILLKILLIIVEIRLLILELKRQAGTDEEAKEEAQRIKELLEQLFELFEKVRESGDLEDAKLLLILAQIVLIIVRIVLLMLELKRQAGTDEEAKEEAQRIKELLEQLFELFEKVRESGDLEDAKLLLILAQIVLIIVRIVLLMLELKRQAGTDEEAKEEAQRIKELLEQLFELFEKVRESGDLEDAKLLLILAQIVLIIVRIVLLMLELKRQAGTDEEAKEEAQRIKELLEQLFELFEKVRESGDLEDAKRLLRDAEFVLKQVQLVLYKLES

SEQ ID NO: 1044 - protein, 273 aa, synthetic construct
  REGION 1..273: note = Synthetic
SELLHELLIEAEELAFRARLLARQSEDENVRRLAQQMYELVQEAKELFEKYRKAGMSPEEVYLSLLLLLLLIKAFLLAIEALILARRSEDENVRRLAQQMYELVQEAKELFEKYRKAGMSPEEVYLSLLLLLLLIKAFLLAIEALILARRSEDENVRRLAQQMYELVQEAKELFEKYRKAGMSPEEVYLSLLLLLLLIKAFLLAIEALILARRSEDENVRRLAQQMYELVQEAKELFEKYRKAGMSPEEVHRSLYRLLIEILELLLRIRLLIH

SEQ ID NO: 1045 - protein, 219 aa, synthetic construct
  REGION 1..219: note = Synthetic
SHMENEIKVIIFEIKLIAKQLGDPELWESAKEALEELQQVKREGDDESLERVLMIARIILIIARILLTALELGDPELWESAKEALEELQQVKREGDDESLERVLMIARIILIIALILLIAKQLGDPELWESAKEALEELQQVKREGDDESLRRVLIIAEIILIIALILLIAKQLGDPELWESAKEALEELQQVKREGDDESLERVLELAVRILARAEYL

SEQ ID NO: 1046 - protein, 273 aa, synthetic construct
  REGION 1..273: note = Synthetic
DTELERLLIEARRLALEARLLAQESEDENVRRLAQQMYELVQEAKELFEKYRKAGMSPEEVYLSLLLLLLLIKAFLLAIEALILARRSEDENVRRLAQQMYELVQEAKELFEKYRKAGMSPEEVYLSLLLLLLLIKAFLLAIEALILARRSEDENVRRLAQQMYELVQEAKELFEKYRKAGMSPEEVYLSLLLLLLLIKAFLLAIEALILARRSEDENVRRLAQQMYELVQEAKELFEKYRKAGMSPEEVYLSLLRLLERIRLLLLQIRILIS

SEQ ID NO: 1047 - protein, 227 aa, synthetic construct
  REGION 1..227: note = Synthetic
DEEIVEALRIVVEILREVKEQGDEELFELAQRALRLLVRALEEGDEELFRKAVEMLEIAKQILEVLRILQEVKEQGDEELFELAQRALELLRQASQTGDEELFRKAVEMLEIAKQILEVLRILQEVKEQGDEELFELAQRALELLRQASQTGDEELFRKAVEMLEIAKQILEVLRILQEVKEQGDEDLFHIARLALEHLRQASQTGDERLFEFAKNLLETAKRLLES

SEQ ID NO: 1048 - protein, 247 aa, synthetic construct
  REGION 1..247: note = Synthetic
DEELVRFQHVANRALHLAEQAGDEEALETVRQLLRKLLEAIEKYEKTGDPRVLELLREMLELALFLITALLALLLAQQAGDEEALETVKQLLRKLLEAIEKYEKTGDPRVLELLREMLELALFLITALLALLLAQQAGDEEALETVKQLLRKLLEAIEKYEKTGDPRVLELLREMLRLAEFLITALLALLLAQQAGDEEALEIVKQLLRKLLEAIEKYEKTGDPRVLELLERAAALALFLIRRLLQL

SEQ ID NO: 1049 - protein, 247 aa, synthetic construct
  REGION 1..247: note = Synthetic
DHETIELLLIVLEVLALADKAGDEEAKETAEEIIRKLEEAFELYQKTGDPKAREIMEELTETAKLLSTVLLVLILAQQAGDEEAIETAREIIRKLIEAFELYQKTGDPKAREIMEELTETAKLLSTVLLVLILAQQAGDEEAIETAREIIRKLIEAFELYQKTGDPKAREIMRELSRTAYLLSTVLLVLILAQQAGDEEAIETAREIIRKLIEAFELYQKTGDPKAREIMEKLYALAALLLHRLKEL

SEQ ID NO: 1050 - protein, 218 aa, synthetic construct
  REGION 1..218: note = Synthetic
DEEFLEVLYVITHLRRQAKQTGDEELLRVVEELLQLAEEAAKAGDLELALQLMLFAKVLITITELLRQAKQTGDEELLRVVEELLQLALEAAKAGDLELALQLMLFAKVLITITELLRQAKQTGDEELLRVVEELLQLALEAAKAGDLELALQLMLFAKVLITITELLRQAKQTGDEELLRVVEELLQLALEAAKAGDEKLAQELRSIAYLLIAQTRL

SEQ ID NO: 1051 - protein, 197 aa, synthetic construct
  REGION 1..197: note = Synthetic
DEFMELVERIRLLVKEALRTIKKLGDEELFKLLQEAAREIYEAAKRGDEERLEFMLQVVRILLLVAQALETIKKLGDEELFKLLQEAAREIYEAAKRGDEERLEFMLQVVRILLLVAQALETIKKLGDEELFKLLQEAAREIYEAAKRGDEERLRQMELVVFVLLVVAHILEHLKRNGDEELFKQAQEFARQIYENS

SEQ ID NO: 1052 - protein, 262 aa, synthetic construct
  REGION 1..262: note = Synthetic
DLLERQLQQSVLIIRELLEKALKKFQETGDPKWREIYEIARQILEKVLEAIQSGDPEEMQIALLLAQLIISVFRILELLEKALKKFQETGDPKWREIYEIARQILEKVLEAIRSGDPEEMQIALLLAQLIISVFRILELLEKALKKFQETGDPKWREIYEIARQILEKVLEAIRSGDPEEMQIALLLAQLIISVFRILELLEKALKKFQETGDPRWREIYEKARQILEKVLEAIRSGDPEEMQEALRLARFIITLFELLEES

SEQ ID NO: 1053 - protein, 235 aa, synthetic construct
  REGION 1..235: note = Synthetic
DEENEYLRTASLLLENLNKLRELYEQYGDEQAQRLLESLKELFEKLLKAYASGDPEELREVLELARYLLTAFKLLQNMKKLRELYEQYGDEQAQRLLESLKELFEKLLKAYASGDPEELREVLELARYLLTAFKLLQNMKKLRELYEQYGDEQAQRLLESLKELFEKLLKAYASGDPEELREVLRLAELLLLAFKFLQLMKKLRELYEQYGDENAQKLLEALHSFFETLLRAYES

SEQ ID NO: 1054 - protein, 242 aa, synthetic construct
  REGION 1..242: note = Synthetic
DLLEEQLLKLILLVRRILLEMQKTGSEEARELFEYFQKVAETAKKATEAGDEEKLRLALLLLQLVILIYRVVQILREMQKTGSEEARELFEYFQKVAETAKKAIEAGDEEKLRLALLLLQLVILIYRVVQILREMQKTGSEEARELFEYFQKVAETAKKAIEAGDEEKLRLALLLLQLVILIYRVVQILREMQKTGSHEARLLFQFFQQVAETAKKAIEAGDEEKLRKALRLLKTVIDLFRS

SEQ ID NO: 1055 - protein, 242 aa, synthetic construct
  REGION 1..242: note = Synthetic
SLLEERLVQLIATVEHILREMQKTGSEEARELFEYFQKVAETAKKALEAGDEEKLRLALLLLQLVILIYRVVQILREMQKTGSEEARELFEYFQKVAETAKKAIEAGDEEKLRLALLLLQLVILIYRVVQILREMQKTGSEEARELFEYFQKVAETAKKAIEAGDEEKLRLALLLLQLVILIYRVVQILREMQKTGSEEARELFRRFQEVAEYAKKAIEAGDEYRLRIALYQLQIVIELYRH

SEQ ID NO: 1056 - protein, 222 aa, synthetic construct
  REGION 1..222: note = Synthetic
DKRERIFHEVKQLIILIRYIAKELGDPELTEFAKQALRELRKAQEAGDDEQLERIYIFVEVVYLIAEITLIALRLGDPELTEFAKQALRELRKAQEAGDDEQLERIYIFVEVVYLIAEITAIANELGDPELTEFAKQALRELRKAQEAGDDEQLERIYIFVLVVYLIARITEIAKELGDPELTEFAKQALRELRKAQEAGDDEQLRRILRFVHEVYIEARIS

SEQ ID NO: 1057 - protein, 231 aa, synthetic construct
  REGION 1..231: note = Synthetic
DLLLIRVIYSILLIHKIQKELKERGDEEIFEMAQRALETAEEALKRGDEESLRFALLLLQVVISIFKIKQIQRELKERGDEEIFEMAQRALETANEAIQRGDEESLRFALLLLQVVISIFKIKQIQRELKERGDEEIFEMAQRALETANEAIQRGDEESLRFALLLLQVVISIFKIKQIQRELKERGDEELLQLAEYALRFANEAIQRGDEESLRKALNLLRNVINLFERS

SEQ ID NO: 1058 - protein, 264 aa, synthetic construct
  REGION 1..264: note = Synthetic
DELEEELFRLLHDLEKHFFELLNIYERYGDEEVLKVLRALQKAIEYAIKALRAGDPEKIRQAQLFLELAFLLAQLAQFMWELLEIYERYGDEEVLKVLRALQKAIEYAIKALRAGDPEKIRQAQLFLELAFLLAQLAQFMWELLEIYERYGDEEVLKVLRALQKAIEYAIKALRAGDPEKIRQAQLFLELAFLLAQLAQFMWELLEIYERYGDEEVLKVLRALQKAIEYAIKALRAGDPEKIRQAQHFLRRAHLLARLAQLLWS

SEQ ID NO: 1059 - protein, 264 aa, synthetic construct
  REGION 1..264: note = Synthetic
DELELRLLQLLLDLLRHFLELREIYERYGDEEVLKVLRALQKAIEYAIKALRAGDPEKIRQAQLFLELAFLLAQLAQFMWELLEIYERYGDEEVLKVLRALQKAIEYAIKALRAGDPEKIRQAQLFLELAFLLAQLAQFMWELLEIYERYGDEEVLKVLRALQKAIEYAIKALRAGDPEKIRQAQLFLELAFLLAQLAQFMWELLEIYERYGDEEVLKVLRELQKAIEHAIKALRAGDPEKIRRAQDFLRVAFELARLAQSLWS

SEQ ID NO: 1060 - protein, 264 aa, synthetic construct
  REGION 1..264: note = Synthetic
DELELELQELLHELQKFFLELRKIYERYGDEEVLKVLRALQKAIEYAIKALRAGDPEKIRQAQLFLELAFLLAQLAQFMWELLEIYERYGDEEVLKVLRALQKAIEYAIKALRAGDPEKIRQAQLFLELAFLLAQLAQFMWELLEIYERYGDEEVLKVLRALQKAIEYAIKALRAGDPEKIRQAQLFLELAFLLAQLAQFMWELLEIYERYGDEEVLKVLRRLQKAIEYAIKALRAGDPEKIRQAQKFLHLAHLAARLAQFLWS

SEQ ID NO: 1061 - protein, 264 aa, synthetic construct
  REGION 1..264: note = Synthetic
DELELELHHLLNLLLSHLEELRLIYERYGDEEVLKVLRALQKAIEYAIKALRAGDPEKIRQAQLFLELAFLLAQLAQFMWELLEIYERYGDEEVLKVLRALQKAIEYAIKALRAGDPEKIRQAQLFLELAFLLAQLAQFMWELLEIYERYGDEEVLKVLRALQKAIEYAIKALRAGDPEKIRQAQLFLELAFLLAQLAQFMWELLEIYERYGDEEVLKVLRELQKAIEYAIKALRAGDPRKIKRAQFYLLRAFVSAEFAQFEWE

SEQ ID NO: 1062 - protein, 263 aa, synthetic construct
  REGION 1..263: note = Synthetic
DEELEKLYLEAVYLIHQIKLLIRRASEETMEKALQFVEFVTQLLRQAEELYKQGNFEEAKRLVELASLIARAIILILLIIILIRNASEETMEKALQFVEFVTQLLRQATELWKQGNFEEAKRLVELASLIARAIILILLIIILIRNASEETMEKALQFVEFVTQLLRQATELWKQGNFEEAKRLVELASLIARAIILILLIIILIRNASEETMEKALQLVEHVTQLLRQATELWKQGNFEEAKRLVERASRLAELIILILRIS

SEQ ID NO: 1063 - protein, 262 aa, synthetic construct
  REGION 1..262: note = Synthetic
SEEFHEISRLLYRATELRLELIEIFEQYGDETVLKIIEIIEEVFEEAFKALKNGDPEQIRKASLFLEIAILLAEAVKLALQLRQIFEQYGDETVLKILEIILEVIEEAIKAVQNGDPEQIRKASLFLEIAILLAEAVKLALQLRQIFEQYGDETVLKILEIILEVIEEAIKAVQNGDPEQIRKASLFLEIAILLAEAVKLALQLRQIFEQYGDETVLRILEIILEVIEEAIKAVQNGDPEQIRKASLFLERAIELARLVLRL

SEQ ID NO: 1064 - protein, 262 aa, synthetic construct
  REGION 1..262: note = Synthetic
DSLFREIQRLLVRAEQLARELRQIFEQYGDETVLKILEIILEVIEEARKALQNGDPEQIRKASLFLEIAILLAEAVKLALQLRQIFEQYGDETVLKILEIILEVIEEAIKAVQNGDPEQIRKASLFLEIAILLAEAVKLALQLRQIFEQYGDETVLKILEIILEVIEEAIKAVQNGDPEQIRKASLFLEIAILLAEAVKLALQLRQIFEQYGDKTVKLILEFILEVIEEAIKAVQNGDPEQIRKASRLLKVAIELAESVLRL

SEQ ID NO: 1065 - protein, 262 aa, synthetic construct
  REGION 1..262: note = Synthetic
DELEQEILELLIRAEQLAKKLREIFEQYGDETVLKILEIILEVIEEAIKAHQNGDPEQIRKASLFLEIAILLAEAVKLALQLRQIFEQYGDETVLKILEIILEVIEEAIKAVQNGDPEQIRKASLFLEIAILLAEAVKLALQLRQIFEQYGDETVLKILEIILEVIEEAIKAVQNGDPEQIRKASLFLEIAILLAEAVKLALQLRQIFEQYGDEQVLRILEYILEVIEEAIKAVQNGDPRQIEEASFLLFLAILLAEHVKLQ

SEQ ID NO: 1066 - protein, 254 aa, synthetic construct
  REGION 1..254: note = Synthetic
DQEEHEENHIHHLFLEIETLAKRVRQLTGDERAEEILKRAEQIFRILREALEAGLYEEAQKMKELLEILLLVLQILLLAIEVLRKTGDERAEEILKRAEQIFRILREALEAGLYEEAQKMKELLEILLLVLQILLLAIEVLKKTGDERAEEILKRAEQIFRILREALEAGLYEEAQKMKLLLEILLLVLQILLLAIEVLKKTGDERAEEILKRAEQIFRILREALEAGLEEEALEMYLQLLLLLLRLEILLKRI

SEQ ID NO: 1067 - protein, 251 aa, synthetic construct
  REGION 1..251: note = Synthetic
REEFEKLLLEIRYLAQQAELLARELGDPEAEEIAKRILQLLEQVWRTMEEKGEEEALSRLEFLLLSVKIVFYALLALKLAKQLGDPEAEEIAKRILQLLEQVWRTMEEKGEEEALSRLEFLLLSVKIVFYALLALKLAKQLGDPEAEEIAKRILQLLEQVWRTMEEKGEEEALSRLEFLLLSVKIVFYALLALKLAKQLGDPEAEEIAKRILQLLEQVWRTMEEKGEEEAKRRLLRLLVLVLQVLLHLQVS

SEQ ID NO: 1068 - protein, 298 aa, synthetic construct
  REGION 1..298: note = Synthetic
DYLERVLLELLLHLEILLRRLRKKQENADEEESRKMQELQEIIRTAIEIAKQALQFVKSGSPDAEEYARLAYLVLVLAILIVELQELLEQLRKKQENADEEESRKMQELQEIIRTAIEIAKQALQFVASGSPDAEEYARLAYLVLVLAILIVELQELLEQLRKKQENADEEESRKMQELQEIIRTAIEIAKQALQFVASGSPDAEEYARLAYLVLVLAILIVELQELLEQLRKKQENADEEESRKMQQLQELIRRAIEIAKQALQFVASGSPDAEEYARRAYQHLRLAILIVELYEQL

SEQ ID NO: 1069 - protein, 284 aa, synthetic construct
  REGION 1..284: note = Synthetic
KQLQELHEVFLEAVRLVILIVDIAERIKRELGDERAQEVSEDAKQMLEEIKEAIERFKRTGDEKAKQLIELALVLLLAILLVLRIVEIAERIKRELGDERAQEVSEDAKQMLEEIKEAIERFKRTGDEKAKQLIRLALVLLLAILLVLEIVEIAERIKRELGDERAQEVSEDAKQMLEEIKEAIERFKRTGDKKAFDLIYLALILLLAILLVLEIVEIAERIKRELGDEFAQKVSEDAKQMLEEIKEAIERFKRTGDQEAFERIVEAFFHLLSILEILKNLEES

SEQ ID NO: 1070 - protein, 284 aa, synthetic construct
  REGION 1..284: note = Synthetic
DEEHELLEVYSRAVQLVLRIERIAERIKRELGDERAQEVSEDAKQMLEEIKEAIERFERTGDEKAKQLIELALVLLLAILLVLEIVEIAERIKRELGDERAQEVSEDAKQMLEEIKEAIERFKRTGDEKAKQLIELALVLLLAILLVLEIVEIAERIKRELGDERAQEVSEDAKQMLEEIKEAIERFKRTGDEKAKQLIELALVLLLAILLVLEIVEIAERIKRELGDERAQEVSEDAKQMLEEIKEAIERFKRTGDEKAKRIIKKAFLILREILHHLENLEES

SEQ ID NO: 1071 - protein, 297 aa, synthetic construct
  REGION 1..297: note = Synthetic
SEELIEFLSEIVQLLALVIQLVVHILRNVSEEDHEIARQLFELVIQLTRLAQEALEILEKTGDPKARELLELAKEALEIILLAALVIWLVVQIKKHVSEEDSEIARQLSELVYQLMRLAFEALQILEKTGDPKARELLELAKEALEIILLAALVIWLVVQIKKHVSEEDSEIARQLSELVYQLMRLAFEALQILEKTGDPKARELLELAKEALEIILLAALVIWLVVQIKKHVSEEDSEIARQLSELVYQLMRLAFEALQILEKTGDPKARELLELAKEALEQILKEAETIWTKVES

SEQ ID NO: 1072 - protein, 268 aa, synthetic construct
  REGION 1..268: note = Synthetic
DLETELEKLLVEASELISKARVIVQQTGDPEAKELIRKMEELFEELRELIQKYRETGDPKYLLLAELLVLLILAAFLIILALVIVQQTGDPEAKELIRKMEELFEELRELIQKYRETGDPKYLLLAELLVLLILAAFLIILALVIVQQTGDPEAKELIRKMEELFEELRELIQKYRETGDPKYLLLAELLVLLILAAFLIILALVIVQQTGDPRAKEHIRHMEENFEELRELIQKYRETGDPKYLLLAELLVRQIEIAFRIIELLVEL

SEQ ID NO: 1073 - protein, 268 aa, synthetic construct
  REGION 1..268: note = Synthetic
DEEEKLEHLLHHAEFLIRYALRLVQQTGDPEAKELIRKMEELFEELRELIQKYRETGDPKYLLLAELLVLLILAAFLIILALVIVQQTGDPEAKELIRKMEELFEELRELIQKYRETGDPKYLLLAELLVLLILAAFLIILALVIVQQTGDPEAKELIRKMEELFEELRELIQKYRETGDPKYLLLAELLVLLILAAFLIILALVIVQQTGDPRAKELIRLMEELFEELRELIQKYRETGDPKYLYEATTVVLRIILAFELILALVRS

SEQ ID NO: 1074 - protein, 268 aa, synthetic construct
  REGION 1..268: note = Synthetic
DLLQELQHLLFEAEYLIEIALEYVQQTGDPEAKELIRKMEELFEELRELIQKYRETGDPKYLLLAELLVLLILAAFLIILALVIVQQTGDPEAKELIRKMEELFEELRELIQKYRETGDPKYLLLAELLVLLILAAFLIILALVIVQQTGDPEAKELIRKMEELFEELRELIQKYRETGDPKYLLLAELLVLLILAAFLIILALVIVQQTGDPRAKELIRRMEELFEELRELIQKYRETGDPKYLHEAHYLVLRIRSAFELILLLVRR

SEQ ID NO: 1075 - protein, 256 aa, synthetic construct
  REGION 1..256: note = Synthetic
SEDEHVLEQISRALTEAAKAILLVQRQGDEELHQRAHEIFEKALEVLRRIVKAKSPEQFKSAFVLAQILLALITALIAYLLVKQQGDEELIQRAREIFEKAREVMERIEKAKSPEQFKSAFVLAQILLALITALIAYLLVKQQGDEELIQRAREIFEKAREVMERIEKAKSPEQFKSAFVLAQILLALITALIAYLLVKQQGDEELIQRAREIFEKAREVMERIEKAKSPEQFKSAFVLAQKLLQEILLLILQLRS

SEQ ID NO: 1076 - protein, 256 aa, synthetic construct
  REGION 1..256: note = Synthetic
SLSEIVLQHILQALVVAALAYQLVEKQGDEELIQRAREIFEKAREVFHRIVKAKSPEQFKSAFVLAQILLALITALIAYLLVKQQGDEELIQRAREIFEKAREVMERIEKAKSPEQFKSAFVLAQILLALITALIAYLLVKQQGDEELIQRAREIFEKAREVMERIEKAKSPEQFKSAFVLAQILLALITALIAYLLVKQEGDEELIQRAREIFEKAREVMERIEKAKSPEQFKSAEKRAIELLLQILALRTLLLL

SEQ ID NO: 1077 - protein, 195 aa, synthetic construct
  REGION 1..195: note = Synthetic
DEMREAETIVHLAEHILENVLRRAKQQGDEENLRIIQLALELLFELLQLLKRTNSPEIIEMLKAVATVVLAILLLLEVLERAKQQGDEENLRIIQLALELLFELLQLLKRTNSPEIIEMLKAVAYVVRAILLLLEVLERAKQQGDEENLRIIQLALELLFELLQLLKRTNSPEIILLLLLVAARVFEILLRLRLS

SEQ ID NO: 1078 - protein, 224 aa, synthetic construct
  REGION 1..224: note = Synthetic
LKMEQLVIEIRHFALLAQTLALQTGDPELRQTVKEIIESLRKALERGDEELLKMLLLIAQIVYYAALALLLAQETGDPELRQTVKEIIESLRKALERGDEELLKMLLLIAQIVYYAALALLLAQETGDPELRQTVKEIIESLRKALERGDEELLKMLLLIAQIVYFAALALLLAQETGDPELRQTVKEIIESLRKALERGDEHLLHRLHLQARLVFLEARYILS

SEQ ID NO: 1079 - protein, 195 aa, synthetic construct
  REGION 1..195: note = Synthetic
DEHERFELFANLAHLFIKEALELVQKQGDEEAIEVIQTILELMLELLRRIKETGNPELLKSLFYLAFAAIALLFILRALELVQKQGDEEAIEVIQTILELMLELLRRIKETGNPELLKSLFFLAYAAQALLFILRALELVQKQGDEEAIEVIQTILELMLELLRRIKETGNPQLLRELIVLATRAILLFLELETS

SEQ ID NO: 1080 - protein, 257 aa, synthetic construct
  REGION 1..257: note = Synthetic
SKELIETLALIIHVLSLAHELLEKAKEAGDEESQRKIEELIRQAEELIERVRNATTKEQLEQILTTAQILLVMLQAIELLLKAKEAGDEESQRKIEELIRQAKELLERVKNATTKEQLEQILTTAQILLVMLQAIELLLKAKEAGDEESQRKIEELIRQAKELLERVKNATTKEQLEQILTTAQILLVMLQAIELLLKAKEAGDEESQRKIEELIRKAKELLERVKNATTKEQLEQILHIAEQLRLDLEAIENKLRS

SEQ ID NO: 1081 - protein, 257 aa, synthetic construct
  REGION 1..257: note = Synthetic
QLEQILTHRQILEVLALAYRLLLIARQAGDEESQRKIEELIRQAEELLERVKNATTKEQLEQILTTAQILLVMLQAIELLLKAKEAGDEESQRKIEELIRQAKELLERVKNATTKEQLEQILTTAQILLVMLQAIELLLKAKEAGDEESQRKIEELIRQAKELLERVKNATTKEQLEQILTTAQILLVMLQAIELLLKAKEAGDEESQRKIEELIRQAKELLERVKNATTKEQLEQILTTARQLHHELLRIELELKQ

SEQ ID NO: 1082 - protein, 289 aa, synthetic construct
  REGION 1..289: note = Synthetic
DFQEEYVSRFILHVIVFAVRVFNEARHLFLRAGDPKALENAQRAEEILQKLRELFEELQRATTPEQFQRLYVSAFILYVILKAIEVVLRALELYRKAGDPKALENAQRAEEIMQKLKELFEELERATTPEQFQRLYVSAFILYVILKAIEVVLRALELYRKAGDPKALENAQRAEEIMQKLKELFEELERATTPEQFQRLYVSAFILYVILKAIEVVLRALELYRKAGDPKALENAQRAEEIMQKLKELFEELERATTPEQFQRLYVSAHQLLIILKRIEQELRNLEES

SEQ ID NO: 1083 - protein, 256 aa, synthetic construct
  REGION 1..256: note = Synthetic
SERLELLSEALRILALLFEILVELERLGDEEAYEKARQVLEEAQRLLEQAQESGDPEDLEFYVLLIQALLILAQLMLILLRLKLLGDEEAYEKAKQVLEEAERLLRQAKESGDPEDLEFYVLLIQALLILAQLMLILLRLKLLGDEEAYEKAKQVLEEAERLLRQAKESGDPEDLEFYVLLIQALLILAQLMLILLRLKLLGDEEAYEKAKQVLEEAERLLRQAKESGDPEDLEFYVRKIQELLKYAQFLLEQLRS

SEQ ID NO: 1084 - protein, 256 aa, synthetic construct
  REGION 1..256: note = Synthetic
DEFEELLEQAYEILLRLQRILLLLKLLGDEEAYEKAKQVLEEAERLLRQAKESGDPEDLEFYVLLIQALLILAQLMLILLRLKLLGDEEAYEKAKQVLEEAERLLRQAKESGDPEDLEFYVLLIQALLILAQLMLILLRLKLLGDEEAYEKAKQVLEEAERLLRQAKESGDPEDLEFYVLLIQALLILAQLMLILLRLKLLGDEEAYEKAKQVLEEAERLLRQAKESGDPEDLRKYVLQIRLLLQQAELLLRELEL

SEQ ID NO: 1085 - protein, 256 aa, synthetic construct
  REGION 1..256: note = Synthetic
DEHEELLEQAIRILVELYYILYTLKLLGDEEAYEKAKQVLEEAERLLRQAIESGDPEDLEFYVLLIQALLILAQLMLILLRLKRLGDEEAYEKAKQVLEEAERLLRQAKESGDPEDLEFYVLLIQALLILAQLMLILLRLKLLGDEEAYEKAKQVLEEAERLLRQAKESGDPEDLRFYVLLIQALLILAQLMLILLRLKLLGDEEAYEKAKQVLEEAERLLRQAKESGDPRDLERYVLLIRELLTHAENLLELLRS

SEQ ID NO: 1086 - protein, 256 aa, synthetic construct
  REGION 1..256: note = Synthetic
DEHDQLLLIAHYILHVLEFILKHLKLLGDEEAYEKAKQVLEEAERLLRQAKESGDPRDLEFYVLLIQALLILAQLMLILLRLKLLGDEEAYEKAKQVLEEAERLLRQAKESGDPEDLEFYVLLIQALLILAQLMLILLRLKLLGDEEAYEKAKQVLEEAERLLRQAKESGDPEDLEFYVLLIQALLILAQLMLILLRLKLLGDEEAYEKAKQVLEEAERLLRQAKESGDPRDLRRYVRLIILLLEEAHEMLKLLRS

SEQ ID NO: 1087 - protein, 288 aa, synthetic construct
  REGION 1..288: note = Synthetic
DEREELIQIAYQIFVLAVRILLWVRVFYEKTGDERAREAYQKVKEIAEKIKESIEQLQRADTKEEIEQAVLTAQAALIIAQAILILLWVSEFYKRTGDERAREAYQKVKEIMEKIKESFEQLERADTKEEIEQAVLTAQAALIIAQAILILLWVSEFYKRTGDERAREAYQKVKEIMEKIKESFEQLERADTKEEIEQAVLTAQAALIIAQAILILLWVSEFYKRTGDERAREAYQLVKEIMEKIKESFEQLERADTKKEIEHAVKHARFALRHAELILEYLWQREHD

SEQ ID NO: 1088 - protein, 288 aa, synthetic construct
  REGION 1..288: note = Synthetic
IEREELQEQAIRISAEALYILNWVQAFYLETGDERAREAYQKVKEILEKIQESLQQLLRADTKEEIEQAVLTAQAALIIAQAILILLWVSEFYKRTGDERAREAYQKVKEIMEKIKESFEQLERADTKEEIEQAVLTAQAALIIAQAILILLWVSEFYKRTGDERAREAYQKVKEIMEKIKESFEQLERADTKEEIEQAVLTAQAALIIAQAILILLWVSEFYKRTGDERAREAYQKVKEIMEKIKESFEQLERADTKEEIFRAVLEARLALQQAELILEYLEHLEKS

SEQ ID NO: 1089 - protein, 192 aa, synthetic construct
  REGION 1..192: note = Synthetic
SEEFHLILELIRILVERVLKLAQELGNPELWESARKLLQLIEEMLELFRKDDERALKSVKFLLLLARIIYYVALVLKLAQELGNPELWESARKLLQLIEEMLELFRKDDRRALESVRFLLTLARIIYYVALVLKLAQELGNPELWESARKLLQLIEEMLELFRKDTQRAYRLVLELLARAYHIFEEAERLKL

SEQ ID NO: 1090 - protein, 288 aa, synthetic construct
  REGION 1..288: note = Synthetic
IEEEVLFEQALRIILLAYEILLYVESFYKRTGDERAREAYQKVKEIVEKIRESFEQLKRADTKEEIEQAVLTAQAALIIAQAILILLWVSEFYKRTGDERAREAYQKVKEIMEKIKESFEQLERADTKEEIEQAVLTAQAALIIAQAILILLWVSEFYKRTGDERAREAYQKVKEIMEKIKESFEQLERADTKEEIEQAVLTAQAALIIAQAILILLWVSEFYKRTGDERAREAYQKVKEIMEKIKESFEQLERADTKEEIEQAVRRAEHALTHAEEILEHLWQSEHS

SEQ ID NO: 1091 - protein, 288 aa, synthetic construct
  REGION 1..288: note = Synthetic
DEFYELLHLALRIAAELFFLLLLARVSYDQTGDERAREVFEQLKRILEEVEEQIEKAQKAKSPEELEFYWLTAQALLILALLIWLLLQASESYKRTGDERAREVFEQLKRIMEEVKEQIEKAKRAKSPEELEFYWLTAQALLILALLIWLLLQASESYKRTGDERAREVFEQLKRIMEEVKEQIEKAKRAKSPEELKFYWLTAQALLILALLIWLLLEASISYKRTGDEFAREVFEQLKRIMEEVKEQIEKAKRAKSPEELREYTLIALHLLNEALAIFTSLRQRRRS

SEQ ID NO: 1092 - protein, 256 aa, synthetic construct
  REGION 1..256: note = Synthetic
SKEEELLLEALRLLLNILEIILRLEEAGDEESVEKAKELFEKALESLERAKRSGDPEDIQLMVLLVQAFLLLAQILLIILKLQLAGDEESVEKAKELFEKALESLERAKRSGDPEDIQLMVLLVQAFLLLAQILLIILKLQLAGDEESVEKAKELFEKALESLERAKRSGDPEDIQLMVLLVQAFLLLAQILLIILKLQLAGDEESVEKAKELFEKALEFLERAKRSGDPEDIQKAVEFVKNFLDKAKLLLQELEL

SEQ ID NO: 1093 - protein, 256 aa, synthetic construct
  REGION 1..256: note = Synthetic
DQLEQLLTEARQILVQIELIIHLLQQAGDEESVEKAKELFEKALESLERAKRSGDPEDIQLMVLLVQAFLLLAQILLIILKLQLAGDEESVEKAKELFEKALESLERAKRSGDPEDIQLMVLLVQAFLLLAQILLIILKLQLAGDEESVEKAKELFEKALESLERAKRSGDPEDIELMVLLVQAFLLLAQILLIILKLQLAGDEESVEKAKELFEKALESLERAKRSGDPEDIQRAVNEVLLFLLLAEVLLRLLKS

SEQ ID NO: 1094 - protein, 256 aa, synthetic construct
  REGION 1..256: note = Synthetic
DREEELLLHAELLLQLIQLIIEHLQKAGDEESVEKAKELFEKALESLERAKRSGDPEDIQLMVLLVQAFLLLAQILRIILLLQLAGDEESVEKAKELFEKALESLERAKRSGDPEDIQLMVLLVQAFLLLAQILLIILKLQLAGDEESVEKAKELFEKALESLERAKRSGDPEDIELMVLLVQAFLLLAQILLIILKLQLAGDEESVEKAKELFEEALELLERAKRSGDPEDIIKNVSLVYAFLHLAQKLLKILKS

SEQ ID NO: 1095 - protein, 256 aa, synthetic construct
  REGION 1..256: note = Synthetic
DQLEQLLLKAYHLLNLIRTIILQLELAGDEESVEKAKELFEKALESLERAKRSGDPEDIQLMVLLVQAFLLLAQILLIILKLQLAGDEESVEKAKELFEKALESLERAKRSGDPEDIQLMVLLVQAFLLLAQILLIILKLQLAGDEESVEKAKELFEKALESLERAKRSGDPEDIQLMVLLVQAFLLLAQILLIILKLQLAGDEESVEKAKELFEKALESLERAKRSGDPEDIQQAVKEVKFFLELAEILLTRLRT

SEQ ID NO: 1096 - protein, 256 aa, synthetic construct
  REGION 1..256: note = Synthetic
NELEELLDHALELLFIIQVIILILQKAGDEESVEKAKELFEKALESLERAERSGDPEDIELMVLLVQAFLLLARILLIILRLQRAGDEESVEKAKELFEKALESLERAKRSGDPRDIELMVLLVQAFLLLAQILHIILLLQEAGDEESVEKAKELFEKALESLERAKRSGDPRDIHLMVNLVQAFLLLAQILLIILHLQLAGDEESVEKAKELFEKALESLERAKRSGDPEDIQQMVDLVLFFLLQAERLLHQLKS

SEQ ID NO: 1097 - protein, 254 aa, synthetic construct
  REGION 1..254: note = Synthetic
SQETLTRIRYLFLIVEIILERAEQAGDEEIYRELKELLRKMKEDFQQAKEANSPESVKLALTLAQIVLLFAQVALILIRAEQAGDEEIYRELKELLRKMKEDFQQAKEANSPESVELALTLAQIVLLFAQVALILIRAEQAGDEEIYRELKELLRKMKEDFQQAKEANSPESVRLALVLAQIVLLFAQVALILIRAEQAGDEEIYRRLKELLRKMKEDFQQAKEANSPESVRQALAQALYVLLLAEEALERIRS

SEQ ID NO: 1098 - protein, 254 aa, synthetic construct
  REGION 1..254: note = Synthetic
SYETLIRIQELFLLVEEILYLAERAGDEEIYRELKELLRKMKEDFQQAKEANSPESVKLALTLAQIVLLFAQVALILIRAEQAGDEEIYRELKELLRKMKEDFQQAKEANSPESVKLALTLAQIVLLFAQVALILIRAEQAGDEEIYRELKELLRKMKEDFQQAKEANSPESVKLALTLAQIVLLFAQVALILIRAEQAGDEEIYRELKELLRKMKEDFQQAKEANSPESVKLALTLAQHVLKFAESARLEIEL

SEQ ID NO: 1099 - protein, 254 aa, synthetic construct
  REGION 1..254: note = Synthetic
LDETEFRIRRLIVQVELILEYAEEAGDEEIYRELKELLRKMKEDFQQAKEANSPESVRLALTLAQIVLLFARVALILIRAERAGDEEIYRELKELLRKMKEDFQQAKEANSPHSVYLALTLAQIVLLFAQVALILIRAEQAGDEEIYRELKELLRKMKEDFQQAKEANSPESVRLALTLAQIVLLFAQVALILIRAEQAGDEEIYRELKELLRKMKEDFQQAKEANSPESVNEAFLRAFRVLYFAQQALEEIES

SEQ ID NO: 1100 - protein, 224 aa, synthetic construct
  REGION 1..224: note = Synthetic
DELEELALRVLRLIYQVELIVRVLGDEELLQTARELLEELEKAFRAGDEEKMRNIYLAASVILLIILVLLLVRKLGDEELLQTARELLEELVKAFRAGDEEKMHNIYLAASVILLIILVLILVKQLGDEELLQTARELLEELVKAFRAGDEEKMHNIFLAASVILLIILVLLLVKQLGDEELLQTARELLEELVKAFRAGDREKMEEIYKEAHLILYKILRLLS

SEQ ID NO: 1101 - protein, 253 aa, synthetic construct
  REGION 1..253: note = Synthetic
SKELETLTRIREILVKVQHLLEEAREQGDLELYRQLKELIEQIRESMERAKEAGSPEQFKQALTLALILLILAKVLKLLLEARQQGDLELYRQLKELIEQIRESMERAKEAGSPEQFKQALTLALILLILAKVLKLLLEARQQGDLELYRQLKELIEQIRESMERAKEAGSPEQFKQALTLALILLILAKVLKLLLEARQQGDLELYRQLKELIEQIRESMERAKEAGSPEQFHRALIHAELLLQIARVLREH

SEQ ID NO: 1102 - protein, 253 aa, synthetic construct
  REGION 1..253: note = Synthetic
DKQRETLEKILQILLTVRLLLYFAREQGDLELYRQLKELIEQIRESMERAREAGSPEQFKQALTLALILLILAKVLQLLLFARQQGDLELYRQLKELIEQIRESMERAKEAGSPEQFKQALTLALILLILAKVLKLLLEARQQGDLELYRQLKELIEQIRESMERAKEAGSPEQFRQALLLALILLILAKVLKLLLEARQQGDLELYRQLKELIEQIRESMERAKEAGSPEQFVEALVRAIYLLLLAEHLKEL

SEQ ID NO: 1103 - protein, 267 aa, synthetic construct
  REGION 1..267: note = Synthetic
DREIERLKNLVLEAILRLHEAILELEELASSSDEEVSETAKQLAENLRKLIEELLRMIEKIKNSTDPEDLKIAELIVRVALAIALLAEAIALLLQLASSSDEEVSETAKQLAENLRKLIEELLRMIEKIKNSTDPEDLKIAELIVRVALAIALLAEAIALLLQLASSSDEEVSETAKQLAENLRKLIEELLRMIEKIKNSTDPRDLNKAKLIVFIAFIIAYLAELIAKLLQSASSSDERVRRVAKQLARNLRELIEQLLRTIEELKN

SEQ ID NO: 1104 - protein, 265 aa, synthetic construct
  REGION 1..265: note = Synthetic
VQVARALEIITQIYARVFHILLRAELRGDEESYRLAKEILRLVEELLREALEAELAGDLKTVQVALAIAIILLILLEVFELMKQAEQRGDEESYRLAKEILRLVKELLEKAIQASEAGDLKTVQVALAIAIILLILLEVFELMKQAEQRGDEESYRLAKEILRLVKELLEKAIQASEAGDLKTVQVALAIAIILLILLEVFELMKQAEQRGDEESYRLAKEILRLVKELLEKAIQASEAGDLKTVQVALREAERLLRELETTERS

SEQ ID NO: 1105 - protein, 265 aa, synthetic construct
  REGION 1..265: note = Synthetic
SHIEHALELIITIYLRVLLLMREAERRGDEESYRLAKEILRLVKELLEKAIEARLRGDLKTVQVALAIAIILLILLEVFELMKQAEQRGDEESYRLAKEILRLVKELLEKAIQASEAGDLKTVQVALAIAIILLILLEVFELMKQAEQRGDEESYRLAKEILRLVKELLEKAIQASEAGDLKTVQVALAIAIILLILLEVFELMKQAEQRGDEESYRLAKEILRLVKELLEKAIQASEAGDLRTVRQALSRAETLLFHLRIHELT

SEQ ID NO: 1106 - protein, 253 aa, synthetic construct
  REGION 1..253: note = Synthetic
DLAEEAAQNVAYILLVLKQLSEQAKREGDEELVEKIREMYERVHQLLEEALKASSPEELLAYWALAVVLLILIQLLKLSEQAKREGDEELVEKIREMYERVKQLLEEARKASSPEELLAYWALAVVLLILIQLLKLSEQAKREGDEELVEKIREMYERVKQLLEEARKASSPEELLAYWALAVVLLILIQLLKLSEQAKREGDEELVEHIREMYERVKQLLEEARKASSPEELLAYWRQAEKLLRLIETIRRL

SEQ ID NO: 1107 - protein, 296 aa, synthetic construct
  REGION 1..296: note = Synthetic
DKLEEMLEEAVEILLEAQQYLFQVRLYFRRFGGEEALEFLQRFKEIWEKIKRLIEQIERSAEAGDPEKVKLLLMIVEALQILLEALKYLLEVLQYFRQFGGEEALEFLQRFKEIWEKIKRLIEQIERSAAAGDPEKVKLLLMIVEALQILLEALKYLLEVLQYFRQFGGEEALEFLQRFKEIWEKIKRLIEQIERSAAAGDPEKVKLLLMIVEALQILLEALKYLLEVLQYFRQFGGEEALEFLQRFKEIWEKIKRLIEQIERSAAAGDPEKVKLLLMIVRKLLTELELLKQQLES

SEQ ID NO: 1108 - protein, 296 aa, synthetic construct
  REGION 1..296: note = Synthetic
DKLDEMILIALQILYEARRYLVEVKHYFRRFGGEEALEFLQRFKEIWEKIKRLIEQIERSAAAGDPEKVKLLLMIVEALQILLEALKYLLEVLQYFRQFGGEEALEFLQRFKEIWEKIKRLIEQIERSAAAGDPEKVKLLLMIVEALQILLEALKYLLEVLQYFRQFGGEEALEFLQRFKEIWEKIKRLIEQIERSAAAGDPEKVKLLLMIVEALQILLEALKYLLEVLQYFRQFGGEEALEFLQRFKEIWEKIKRLIEQIERSAAAGDPEKVKLLLMIVRRLQEQLEILKRQLES

SEQ ID NO: 1109 - protein, 265 aa, synthetic construct
  REGION 1..265: note = Synthetic
SEALRKALEFYELALRVLLEVKEAGDEESIQKAKELLRQVEELYERIREALERGDPETMRRALTLLKALSFSILALIVLLLVKQAGDEESIQKAKELLRQVEELLERIREALERGDPETMRRALTLLKALSFSILALIVLLLVKQAGDEESIQKAKELLRQVEELLERIREALERGDPETMRRALTLLKALSFSILALIVLLLVKQAGDEESIQKAKELLRQVEELLERIREALERGDPETMRRALELLRELETKILQLILQLRS

SEQ ID NO: 1110 - protein, 265 aa, synthetic construct
  REGION 1..265: note = Synthetic
SLTEEKATRFLLLAAHVLVLVRREGDEESIQKAKELYRQVEELYERIREALERGDPETMRRALTLLKALSFSILALIVLLLVKRAGDEESIQKAKELLRQVEELLERIREALERGDPETMRRALTLLKALSFSILALIVLLLVKQAGDEESIQKAKELLRQVEELLERIREALERGDPETMRRALTLLKALSFSILALIVLLLVKQAGDEESIQKAKELLRQVEELLERIREALERGDPETMRRALTLLRELRKLIRKLEVELES

SEQ ID NO: 1111 - protein, 222 aa, synthetic construct
  REGION 1..222: note = Synthetic
DELEAIVHEVRAILIRVKQYARELGDPEFFRTAQEILERAVRASQEGDEETLKLLLMLARVILILVQVLKYAKELGDPEFFRTAQEILERAVRASQEGDEETLKLLLMLARVILILVQVLKYAKELGDPEFFRTAQEILERAVRASQEGDEETLKLLLMLARVILILVQVLKYAKELGDPEFFRTAQEILERAVRASQEGDEELLLRLLTEAKILLLRVQVL

SEQ ID NO: 1112 - protein, 254 aa, synthetic construct
  REGION 1..254: note = Synthetic
DHEERFLLLVLLLALYVETLAHQAGNEEMIEEARRLFEEVRKLVERLINATTEEQQKQALLSAKLLYVLISALIVIIFAIRAGNEEMIEEARRLFEEVRKLFERLRNATTEEQQKQALLSAKLLYVLISALLVIIFAIQAGNEEMIEEARRLFEEVRKLFERLRNATTEEQQKQALLSAKLLYVLISALLVIIRAIQAGNEEMIERARRLFEEVRKLFERLRNATTEEQQKQALESALELYALILLLIEQINEI

SEQ ID NO: 1113 - protein, 205 aa, synthetic construct
  REGION 1..205: note = Synthetic
DEELRVLEQLVESLLRIIVEIVRELQRQGDEEEAEQFRQFYEYARELWQRAKEAGDPEEASRLLKLALLSLLVMLLLYLIVETVRELQRQGDEEEAEQFRQFYEYARELWQRAKEAGDPTEALILLELAILSLRVMRYLFEIVETVRELQRQGDEEEAEQFRQFYEYARELWQRAKEAGDPFRASRLLHEAILSLQRMLLHFRRV

SEQ ID NO: 1114 - protein, 205 aa, synthetic construct
  REGION 1..205: note = Synthetic
DEKLQELELKVRTLLFHIKIIVELLQRRGDEEEAEQFRQFYEYARELWQRAKEAGDPEEASRLLKLAILSLRVMIYLFKIVETVRELQRQGDEEEAEQFRQFYEYARELWQRAKEAGDPEEASRLLKLAILSLRVMEYLFKIVETVRELQRQGDEEEAEQFRQFYEYARELWQRAKEAGDPEEASRLLHKAIISLILMLARFELS

SEQ ID NO: 1115 - protein, 244 aa, synthetic construct
  REGION 1..244: note = Synthetic
DEVEELELEFTLLLILALILALRAGDQEMFQEVEETYRQSIEEIRNAKDKEEIKEILKVFLLQAQFSSYLAKALLLAKLAGDEEMWQEVLETFRQSIEEIRNAKDKEEIKEILKVFLLQAQFSSYLAKALLLAKLAGDEEMWQEVLETFRQSIEEIRNAKDKEEIKEILKVFLLQAQFSSLLAKALLLAKLAGDEEMWQEVLETFRQSIEEIRNAKDKEEIKEILKVFLRLARKFSDQAKANLS

SEQ ID NO: 1116 - protein, 240 aa, synthetic construct
  REGION 1..240: note = Synthetic
DELEKLKLKITLILILALLFAQRAGDRETYERIRQQLRETQEKVRTLSPEEIKKFLELIYLLALIVLLLVQALYFAKLAGDEETMERIKQQLRETQEKVRTLSPEEIKKFLELIYLLALIVLLLVQALYFAKLAGDEETMERIKQQLRETQEKVRTLSPEEIKKFLELIYLLALIVLLLVQALYFAKLAGDEETMERIKQQLRETQEKVRTLSPEEIKKFLELIYEIAEKVLLHVRLLYL

SEQ ID NO: 1117 - protein, 240 aa, synthetic construct
  REGION 1..240: note = Synthetic
DEEEILHNEILVILLRALHFARLAGDEETYERIRQQLRETQEKVRTLSPEEIKKFLELIYLLALIVLLLVQALYFAKLAGDEETMERIKQQLRETQEKVRTLSPEEIKKFLELIYLLALIVLLLVQALYFAKLAGDEETMERIKQQLRETQEKVRTLSPEEIKKFLELIYLLALIVLLLVQALYFAKLAGDEETMERIKQQLRETQEKVRTLSPEEIKRFLEQIFYKALEVLVRVELLLS

SEQ ID NO: 1118 - protein, 240 aa, synthetic construct
  REGION 1..240: note = Synthetic
DELEFLELRIRALLRLAEYFAREAGDEETLERIKQQLRETQEKVRTLSPEEIKKFLELILLLALIVLLLVQALYFAKLAGDEETMERIKQQLRETQEKVRTLSPEEIKKFLELIYLLALIVLLLVQALYFAKLAGDEETMERIKQQLRETQEKVRTLSPEEIKEFLRLIYLLALIVLLLVQALYFAKLAGDEETMERIKQQLRETQEKVRTLSPEEIEQFLYRILAIAKQVLERVQALYF

SEQ ID NO: 1119 - protein, 240 aa, synthetic construct
  REGION 1..240: note = Synthetic
DELEELEREIRLILQEAELFARRAGDEETMERIKQQLRETQEKVRTLSPEEIKKFLELIYLLALIVLLLVQALYFAKLAGDEETMERIKQQLRETQEKVRTLSPEEIKKFLELIYLLALIVLLLVQALYFAKLAGDEETMERIKQQLRETQEKVRTLSPEEIKKFLELIYLLALIVLLLVQALYFAKLAGDEETMERIKQQLRETQEKVRTLSPEEIKRFLHRILLIAQEVLLRVKYLYS

SEQ ID NO: 1120 - protein, 254 aa, synthetic construct
  REGION 1..254: note = Synthetic
TEEIEEMLREIERIVNLIHNLISEIEQQGQGEEAKELYKIAKEVLQQAVEARRRGDKETVEIALMIAQIALLVAQIFKLIREIEKQGQGEEAKELYKIAKEVLQQAVEARRRGDKETVEIALMIAQIALLVAQIFKLIREIEKQGQGEEAKELYKIAKEVLQQAVEARRRGDKETVEIALMIAQIALLVAQIFKLIREIEKQGQGEEAKELYKLAKEVLQQAVEARRRGDKETVEKALKIARAALLRAEAIKLS

SEQ ID NO: 1121 - protein, 254 aa, synthetic construct
  REGION 1..254: note = Synthetic
DDEIFEMLIKIERLVLDIKQLIYQIEQQGQGEEAKELYKIAKEVLQQAVEARRRGDKETVEIALMIAQIALLVAQIFKLIREIEKQGQGEEAKELYKIAKEVLQQAVEARRRGDKETVEIALMIAQIALLVAQIFKLIREIEKQGQGEEAKELYKIAKEVLQQAVEARRRGDKETVEIALMIAQIALLVAQIFKLIREIEKQGQGEEAKELYKEAKEVLQQAVEARRRGDKETVEIALRRARLALIQAHLIKHR

SEQ ID NO: 1122 - protein, 222 aa, synthetic construct
  REGION 1..222: note = Synthetic
SELETMETQVRAILEAVKLLAEHLGDPEFFRTAQEILERAVRASQEGDEETLKLLLMLARVILILVEVLIYALELGDPEFFRTAQEILERAVRASQEGDEHTLHLLLMLARVILILVQVLKYAKELGDPEFFRTAQEILERAVRASQEGDSHTLQLLLLLARVILILVQVLKYAKELGDPEFFRTAQEILERAVRASQEGDSELLFRLLAQAYHILHKVRRL

SEQ ID NO: 1123 - protein, 254 aa, synthetic construct
  REGION 1..254: note = Synthetic
DEEIERMLLEISVIVDRIRYLIEKIEKQGQGEEAKELYKIAKEVLQQAVEARRRGDKETVEIALMIAQIALLVAQIFYLIREIEKQGQGEEAKELYKIAKEVLQQAVEARRRGDKETVEIALMIAQIALLVAQIFKLIREIEKQGQGEEAKELYKIAKEVLQQAVEARRRGDKRTVEIALMIAQIALLVAQIFKLIREIEKQGQGEKAKELYKEAKEVLQQAVEARRRGDFETVIRALHNARIALTLAEFIKRS

SEQ ID NO: 1124 - protein, 254 aa, synthetic construct
  REGION 1..254: note = Synthetic
DEEIYEMLLKIKFIVEQIRFLIEQIEKQGQGEEAKELYKIAKEVLQQAVEARRRGDKETVEIALMIAQIALLVAQIFRLIREIEKQGQGEEAKELYKIAKEVLQQAVEARRRGDKETVEIALMIAQIALLVAQIFKLIREIEKQGQGEEAKELYKIAKEVLQQAVEARRRGDKETVEIALMIAQIALLVAQIFKLIREIEKQGQGEEAKELYKLAKEVLQQAVEARRRGDRETVLRALINARIALQQAQEFKLI

SEQ ID NO: 1125 - protein, 254 aa, synthetic construct
  REGION 1..254: note = Synthetic
TEEIRLMLRRIQELVNQIKILIEEIEKQGQGEEAKELYKIAKEVLQQAVEARRRGDKETVEIALMIAQIALLVAQIFLLIREIEKQGQGEEAKELYKIAKEVLQQAVEARRRGDKETVEIALMIAQIALLVAQIFKLIREIEKQGQGEEAKELYKIAKEVLQQAVEARRRGDKETVKIALMIAQIALLVAQIFKLIREIEKQGQGERAKELYKIAKEVLQQAVEARRRGDEETVFQALLTAIHALLQAEILKHL

SEQ ID NO: 1126 - protein, 257 aa, synthetic construct
  REGION 1..257: note = Synthetic
DEEHEILHLILEALVLARLLKRLGTVDEETVQRLYEEIVQLLKEFEEAEEEGDPEKMRKVSELAKILILILIALELAWRLKQSGTVDEETVQRLYEEIVQLLKEFLEAREEGDPEKMRKVSELAKILILILIALQLAWELKQSGTVDEETVQRLYEEIVQLLKEFLEAREEGDPEKMRKVSELAEILITILIALQLAWELKQSGTVDEETVQRLYEEIVQLLKEFLEAREEGDPRKMRRVHEIASELIARLETQQRL

SEQ ID NO: 1127 - protein, 300 aa, synthetic construct
  REGION 1..300: note = Synthetic
DELEEEIQHWLNLIHELLLRLHRLARQANDEELSEEIQQSFEKIKELMEKAIRLFEQAEKTGDPRLLEKALLVVIIAWWIAEITLLLIRLWQHARQANDEELSEEIQQSFEKIKELMEKAIRLFEQAEKTGDPRLLEKALLVVIIAWWIAEITLLLIRLWQHARQANDEELSEEIQQSFEKIKELMEKAIRLFEQAEKTGDPRLLEKALLVVIIAWWIAEITLLLIRLWQHARQANDEELSEEIQQFFEEIKELMEKAIRLFEQAEKTGDPRLLEKALRVVRHAWLLAEVTLLLIELHQS

SEQ ID NO: 1128 - protein, 300 aa, synthetic construct
  REGION 1..300: note = Synthetic
DELEEEIRRWLFEIRLLLERLWKLARQANDEELSEEIQQSFEKIKELMEKAIRLFEQAEKTGDPRLLEKALLVVIIAWWIAEITLLLIRLWQHARQANDEELSEEIQQSFEKIKELMEKAIRLFEQAEKTGDPRLLEKALLVVIIAWWIAEITLLLIRLWQHARQANDEELSEEIQQSFEKIKELMEKAIRLFEQAEKTGDPRLLRRALHVVEIAWWIAEITLLLIRLWQHARQANDEELSEQIQQSFEEIKELMEKAIRLFEQAEKTGDPRLLLRALVLVILAFYLAKLTLEYIREHQS

SEQ ID NO: 1129 - protein, 300 aa, synthetic construct
  REGION 1..300: note = Synthetic
DLLEEIIKRLLNQIKALLDLLKELARQANDEELSEEIQQSFEKIKELMEKAIRLFEQAEKTGDPRLLEKALLVVIIAWWIAEITLLLILLWRHARHANDEELSEEIQQSFEKIKELMEKAIRLFEQAEKTGDPRLLEKALLVVIIAWWIAEITLLLIRLWQHARQANDEELSEEIQQSFEKIKELMEKAIRLFEQAEKTGDPRLLRLALLVVIIAWFIAEITLLLIRLWQHARQANDEELSEHIQQSFEKIKELMEKAIRLFEQAEKTGDPRLLYEALLVVIHAFTLAEITLQLIRDHQS

SEQ ID NO: 1130 - protein, 250 aa, synthetic construct
  REGION 1..250: note = Synthetic
DSEVEQLLLEAESLLKTLKRQYEQTGDEQIRRIAEEVLRLLEKALQLYEAGNLEEALKTLIVATQLLRASILLIRLKRQYEQTGDEQIRRIAEEVLRLLEKALQLYEAGNLEEALKTLIVATQLLEASILLIRLKRQYEQTGDEQIRRIAEEVLRLLEKALQLYEAGNLEEALKTLRVATQLLEASILLIRLKRQYEQTGDEQIRRIAEHVLRLLEKALQAYEAGNLLRALSLLYEATLFLEESIRRIES

SEQ ID NO: 1131 - protein, 247 aa, synthetic construct
  REGION 1..247: note = Synthetic
SEKLERLIKKIEQLLEELKRKWEQTGDEEIRQNLEKVKQLMEEAYRFYRQGDSTALEVVKLALLIALIALLLIRLKEKWEQTGDEEIRQNLEKVKQLMEEAYRFYRQGDSTALEVVKLALLIALIALLLIRLKEKWEQTGDEEIRQNLEKVKQLMEEAYRFYRQGDSTALEVVKLALLIALIALLLIRLKEKWEQTGDEEIRQNLEKVKQLMEEAYRFYRQGDKRAENVVLRALNLAKDALFQIELS

SEQ ID NO: 1132 - protein, 250 aa, synthetic construct
  REGION 1..250: note = Synthetic
DEEFRELVFKARALVEIIKRLWEQTGDEELWRSLQEVVRTIRKAVELYQQGNIEEAIKSLLFAYLMLEALVLVYRIKKLWEQTGDEELWRSLQEVVRTIRKAVELYQQGNIEEAIKSLLFAYLMLEALLLVYRIKKLWEQTGDEELWRSLQEVVRTIRKAVELYQQGNIEEAILSLLFAYLMLEALLLVYRIKKLWEQTGDEELWRSLQEVVRTIRKAVELYQQGNIERALSLLQEALTRLRLLLQEYRS

SEQ ID NO: 1133 - protein, 222 aa, synthetic construct
  REGION 1..222: note = Synthetic
SELERMETEVREILSLVKTIAENLGDPEFFRTAQEILERAVRASQEGDEETLKLLLMLARVILILVRVLVYAKELGDPEFFRTAQEILERAVRASQEGDEETLKLLLMLARVILILVQVLKYAKELGDPEFFRTAQEILERAVRASQEGDHRTLLLLLILAEVILILVQVLKYAKELGDPEFFRTAQEILERAVRASQEGDLRTLLQLLLDARYILIEVREL

SEQ ID NO: 1134 - protein, 238 aa, synthetic construct
  REGION 1..238: note = Synthetic
DQIEHLVELVRELALQLEILARQTGDKEFSEQARELARRVFETLQRVSEEEALRTIQIYMLVLLVLLLALQLYLQAKKTGDKEFSEQARELARRVFETLQRVSEEEALRTIQIYMLVLLVLLLALQLYEQARKTGDKEFSEQARELARRVFETLQRVSEEEALRTIRIYELVLRVLLIALQLYEQAKKTGDKEFSEQARELARRVFETLQRVSEEEARETIIRYLAHLHKLLTHLEAS

SEQ ID NO: 1135 - protein, 202 aa, synthetic construct
  REGION 1..202: note = Synthetic
SEELELNILVFEIELLARYLGDPEFMESARRLFEMAKSGDEEEVQRAYEIAQLLTLVLRILILAKELGDPEFMESARRLFEMAKSGDEEEVRRAYLIAQLLLLVLLILKLAKELGDPEFMESARRLFEMAKSGDREEVHRAYLIAQLLLLVLLILKLAKELGDPEFMESARRLFEMAKSGDKEEVLRAYLIARELLHVLEEL

SEQ ID NO: 1136 - protein, 250 aa, synthetic construct
  REGION 1..250: note = Synthetic
SELFYELVLKARRLVYHIKRLWEQTGDEELWRSLQEVVRTIRKAVELYQQGNIEEAIKSLLFAYLMLEALLLVYRIKKLWEQTGDEELWRSLQEVVRTIRKAVELYQQGNIEEAIKSLLFAYLMLEALLLVYRIKKLWEQTGDEELWRSLQEVVRTIRKAVELYQQGNIEEAIKSLLFAYLMLEALLLVYRIKKLWEQTGDEELWRALQEVVRTIRKAVELYQQGNIEEAIKSLEKAVLQLRILLLQYEL

SEQ ID NO: 1137 - protein, 250 aa, synthetic construct
  REGION 1..250: note = Synthetic
SELFHELLHKAEALIFTIKQLWEETGDEELWRSLQEVVRTIRKAVELYQQGNIEEAIKSLLFAYLMLEALFLVYKIKELWEETGDEELWRSLQEVVRTIRKAVELYQQGNIEEAIKSLLFAYLMLEALLLVYRIKKLWEQTGDEELWRSLQEVVRTIRKAVELYQQGNIEEAIKSLLFAYLMLEALLLVYRIKKLWEQTGDEELWRSLQEVVRTIRKAVELYQQGNIEEALLVLFRALLILLELELYFHS

SEQ ID NO: 1138 - protein, 247 aa, synthetic construct
  REGION 1..247: note = Synthetic
DEKFRHLEHEIRIYWELVREIWEQTGDEKAYRVAQRAWESMQKAYESFEAGDKEEALKILKFALLILQIFLLWVEVREIWEQTGDEKAYRVAQRAWESMQKAYESFEAGDKEEALKILKFALLILQIFLLWVEVREIWEQTGDEKAYRVAQRAWESMQKAYESFEAGDKEKALRILLFALLILQIFLLWVEVREIWEQTGDEKAYRVAQRAWEYMQEAYEFFEAGDIDQALAILYLALILLRLFLES

SEQ ID NO: 1139 - protein, 254 aa, synthetic construct
  REGION 1..254: note = Synthetic
STEIEYLLVEARLFITEALLIAQRTGSEELLQLVRMAAELVKEVWESFKQGNMEEVLKQAQIALFIARAISYIAQAYEIAKRTGSEELLQLVRMAAELVKEVWESFKQGNMEEVLKQAQIALFIARAISYIAQAYEIAKRTGSEELLQLVRMAAELVKEVWESFKQGNMEEVLKQAQIALFIARAISYIAQAYEIAKRTGSEELLQLVRMAAELVKEVWESFKQGNMEEVLRLARQALLFARIISLIAELFENS

SEQ ID NO: 1140 - protein, 254 aa, synthetic construct
  REGION 1..254: note = Synthetic
QEQIEKFIFRAREYIEQAYEIAKRTGSEELLQLVRMAAELVKEVWESFKQGNMEEVLKQAQIALFIARAISYIAQAYEIAKRTGSEELLQLVRMAAELVKEVWESFKQGNMEEVLKQAQIALFIARAISYIAQAYEIAKRTGSEELLQLVRMAAELVKEVWESFKQGNMEEVLKQAQIALFIARAISYIAQAYEIAKRTGSEELLQLVRKAAEFVKEVWESFKQGNMEEVLHLARLALIYARAISLLAQYFELS

SEQ ID NO: 1141 - protein, 254 aa, synthetic construct
  REGION 1..254: note = Synthetic
SDEIERLILQARIFILHAREIARRTGSEELLQLVRMAAELVKEVWESFKQGNMEEVLKQAQIALFIARAISYIAQAYEIAKRTGSEELLQLVRMAAELVKEVWESFKQGNMEEVLKQAQIALFIARAISYIAQAYEIAKRTGSEELLQLVRMAAELVKEVWESFKQGNMEEVLKQAQIALFIARAISYIAQAYEIAKRTGSEELLQLVRMAAELVKEVWESFKQGNMKEVHEQAYEALLFAQLISLRAELFERS

SEQ ID NO: 1142 - protein, 254 aa, synthetic construct
  REGION 1..254: note = Synthetic
QRQIKKFLNKALVFIFIAEVIARFTGSEELLQLVRMAAELVKEVWESFKQGNMEEVLKQAQIALFIARAISYIAQAYLIAKETGSEELLQLVRMAAELVKEVWESFKQGNMEEVLKQAQIALFIARAISYIAQAYEIAKRTGSEELLQLVRMAAELVKEVWESFKQGNMEEVLKQARIALLIARAISYIAQAYEIAKRTGSEELLQLVRMAAELVKEVWESFKQGNMEEVYELALEALRFAIHISLLAHQFEYH

SEQ ID NO: 1143 - protein, 254 aa, synthetic construct
  REGION 1..254: note = Synthetic
STKIELLIIIAEFFIRIAHEIAKRTGSEELLQLVRMAAELVKEVWESFKQGNMEEVLKQAQIALFIARAISYIAEAYEIAKRTGSEELLQLVRMAAELVKEVWESFKQGNLEEVKFQAQIALFIARAISYIAQAYEIAKRTGSEELLQLVRMAAELVKEVWESFKQGNLEEVYIQAIIALFIARAISYIAQAYEIAKRTGSEELLQLVRMAAELVKEVWETFKQGNLDHVLYRAIEALIFAERISIIAERYEIA

SEQ ID NO: 1144 - protein, 253 aa, synthetic construct
  REGION 1..253: note = Synthetic
DELEFLLHEAEAYVYLIEILARLTGDEELKELVKIIWELIKQLAELSRQGDYEEAKKTVKLILLMAQAVLLVALISVLAQLTGDEELKELVKIIWELIKQLAELSRQGDLQRAELTVRLILLMAQAVLLVALISLLARKTGDEELKELVKIIWELIKQLAELSRQGDFERAFRTVFLILLMALAVLLVAEISTLARELGDEELKELVKIIWELIKQLAELSRQGDIEKALELVVKILDFALRVLVFAYESTLS

SEQ ID NO: 1145 - protein, 253 aa, synthetic construct
  REGION 1..253: note = Synthetic
DDEFREILLRALLFVHRANQLARETGSEELKELVKLIVESIKRVFRSWQQGNLEEALKQAKFVLTLARAIWYVALAYKLAQETGSEELKELMKLIVESIKRVFRSWQQGNLEEALKQAKFVLTLARAIWYVALAYKLAQETGSEELKELMKLIVESIKRVFRSWQQGNLEEALKQAKFVLTLARAIWYVALAYKLAQETGSEELKELMKLIVESIKRVFRSWQQGNLEEALKQAKFVLRLAERIWLQARLFKS

SEQ ID NO: 1146 - protein, 222 aa, synthetic construct
  REGION 1..222: note = Synthetic
DELELLANRVRYLLFQIKKLVEQTGDPEMMESAKELLRRLIEALRNGDFETIKQLLIAAQVLYLLAEILILVQQTGDPEMMESAKELLRRLIEALRNGDFETIKQLLIAAQVLYLLAEILILVQQTGDPEMMESAKELLRRLIEALRNGDFETIKQLLIAAQVLYLLAEILILVQQTGDPEMMESAKELLRRLIEALRNGDFETIHRLLIQAKILFLRARLL

SEQ ID NO: 1147 - protein, 253 aa, synthetic construct
  REGION 1..253: note = Synthetic
SKEFEQTLIKARFHVEQAEFLAKETGSEELKELMKLIVESIKRVFRSWQQGNLEEALKQAKFVLTLARAIWYVALAYKLAQETGSEELKELMKLIVESIKRVFRSWQQGNLEEALKQAKFVLTLARAIWYVALAYKLAQETGSEELKELMKLIVESIKRVFRSWQQGNLEEALKQAKFVLTLARAIWYVALAYKLAQETGSEELKELMKLIVESIKRVFRSWQQGNLEEALRQAREVLTIAREIFLRAENVKS

SEQ ID NO: 1148 - protein, 253 aa, synthetic construct
  REGION 1..253: note = Synthetic
QKEFEETLTEARVFVFQAKNLAELTGSEELKELMKLIVESIKRVFRSWQQGNLEEALKQAKFVLTLARAIVYVALAYRLALQTGSEELKELMKLIVESIKRVFRSWQQGNLEEALKQAKFVLTLARAIWYVALAYKLAQETGSEELKELMKLIVESIKRVFRSWQQGNLEEALKQAEFVLILARAIWLVALAYKLAQETGSEELKELMKLIVESIKRVFRSWQQGNLREALQLAFKVLQLAFKILSEAEAVKS

SEQ ID NO: 1149 - protein, 284 aa, synthetic construct
  REGION 1..284: note = Synthetic
SLFEEIERLLIEIRSLLQRAEHLIKEHEQQGDEETYRQMKELLQLVLEIAKQAVEYARAGRLEEALLFAKIALLLARILVLLLLASRLIREHEKQGDEETYRQMKELLQLVLEIAKQAVEYARAGRLEEALLFAKIALLLARILVLLLLASRLIREHEKQGDEETYRQMKELLQLVLEIAKQAVEYARAGRLEEALLFAKIALLLARILVLLLLASRLIREHEKQGDEETYRQMKELLQLVLEIAKQAVEYARAGRLEEALRLAERALTLAYLLFLLLRLRKLS

SEQ ID NO: 1150 - protein, 284 aa, synthetic construct
  REGION 1..284: note = Synthetic
LLEEKIERLLLEIHSLLEEAKSLIKLHESQGDEETYRQMKELLQLVLEIAKQAVEYARAGRLEEALLFAKIALLLARILVLLLLASELIREHEKQGDEETYRQMKELLQLVLEIAKQAVEYARAGRLEEALLFAKIALLLARILVLLLLASRLIREHEKQGDEETYRQMKELLQLVLEIAKQAVEYARAGRLEEALLFAKIALLLARILVLLLLASRLIREHEKQGDEETYRQMKELLQLVLELAKQAVEYARAGRLEEAERIAKRALNLAYILVLLLLYVRLS

SEQ ID NO: 1151 - protein, 284 aa, synthetic construct
  REGION 1..284: note = Synthetic
DEEDEIEVILLKIKALLVYARLLIKEHERQGDEETYRQMKELLQLVLEIAKQAVEYARAGRLEEALLFAKIALLLARILVLLLLASRLIREHEKQGDEETYRQMKELLQLVLEIAKQAVEYARAGRLEEALLFAKIALLLARILVLLLLASRLIREHEKQGDEETYRQMKELLQLVLEIAKQAVEYARAGRLEEALLFAKIALILARILVLLLLASRLIREHEKQGDEETYRQMKELLQLVLELAKQAVELARAGRLEQAENVALEALALAQLLFVQLLLTRSS

SEQ ID NO: 1152 - protein, 284 aa, synthetic construct
  REGION 1..284: note = Synthetic
LLEEKIEELLREIHLLLQRAEVLIQQHERQGDEETYRQMKELLQLVLEIAKQAVEYARAGRLEEALLFAKIALLLARILVLLLLASRLIREHEKQGDEETYRQMKELLQLVLEIAKQAVEYARAGRLEEALLFAKIALLLARILVLLLLASRLIREHEKQGDEETYRQMKELLQLVLEIAKQAVEYARAGRLEEALLFAKIALLLARILVLLLLASRLIREHEKQGDEETYRQMKELLQLVLEIAKQAVEYARAGRLEEALLFAKIALRLARLLLLQLEVTRLD

SEQ ID NO: 1153 - protein, 284 aa, synthetic construct
  REGION 1..284: note = Synthetic
DLEIEIEHLLLQIELLLYYAKYLIELHEKQGDEETYRQMKELLQLVLEIAKQAVEYARAGRLEEALLFAKIALLLARILVLLLLASRLIREHEKQGDEETYRQMKELLQLVLEIAKQAVEYARAGRLEEALLFAKIALLLARILVLLLLASRLIREHEKQGDEETYRQMKELLQLVLEIAKQAVEYARAGRLEEALLFARIALLLARILVLLLLASRLIREHEKQGDEETYRQMKELLQLVLEIAKQAVEYARAGRLERALELALQALVLAEILVYRLEVARRR

SEQ ID NO: 1154 - protein, 284 aa, synthetic construct
  REGION 1..284: note = Synthetic
DLEEKIRLILQLIEVFLEFASRLIREHEKQGDEETYRQMKELLQLVLEIAKQAVEYARAGRLEEALLFAKIALLLAIILVLLLEASLLIREHEKQGDEETYRQMKELLQLVLEIAKQAVEYARAGRLEEALLFAKIALLLARILVLLLLASRLIREHEKQGDEETYRQMKELLQLVLEIAKQAVEYARAGRLHEAEQFALIALLLARILVLLLLASRLIREHEKQGDEETYRQMKELLQLVLEIAKQAVEYARAGRLEEAYLLAYKALLLARKLVELLRASRLI

SEQ ID NO: 1155 - protein, 284 aa, synthetic construct
  REGION 1..284: note = Synthetic
LLFEKIKRLLAEIEVLLHRAKHLIRDHEEQGDEETYRQMKELLQLVLEIAKQAVEYARAGRLEEALLFAKIALLLARILVLLLLASELIREHEKQGDEETYRQMKELLQLVLEIAKQAVEYARAGRLEEALLFAKIALLLARILVLLLLASRLIREHEKQGDEETYRQMKELLQLVLEIAKQAVEYARAGRLEEALLFAKIALLLARILVLLLLASRLIREHEKQGDEETYRQMKELLQLVLEIAKQAVEYARAGRLEEAERLAQRALILAIELVHLLELTRKS

SEQ ID NO: 1156 - protein, 284 aa, synthetic construct
  REGION 1..284: note = Synthetic
DLELKIKHILQLIETLLEYAHHLIRQHEKQGDEETYRQMKELLQLVLEIAKQAVEYARAGRLEEALLFAKIALLLARILVLLLEASKLIREHEKQGDEETYRQMKELLQLVLEIAKQAVEYARAGRLEEALLFAKIALLLARILVLLLLASRLIREHEKQGDEETYRQMKELLQLVLEIAKQAVEYARAGRLEEALLFAEIALLLARILVLLLLASRLIREHEKQGDEETYRQMKELLQLVLEIAKQAVEYARAGRLEEALKFAFEALLEARLLVELLLRSRLI

SEQ ID NO: 1157 - protein, 224 aa, synthetic construct
  REGION 1..224: note = Synthetic
DEREFLLYEVRHLLALAFLLAQKAGDPSFQESVKEILEELRRAYELGDEETMRQLLILAQVLLLLALAFLLAQKAGDPSFQESVKEILEELQRAFELGDEETMRQLLILAQVLLLLALAFLLAQKAGDPSFQESVKEILEELQRAFELGDEETMRQLLILAQVLLFLALAFLLAQKAGDPSFQESVKEILEELQRAFELGDEKRMHQLELLAKSLFAEARYLLL

SEQ ID NO: 1158 - protein, 268 aa, synthetic construct
  REGION 1..268: note = Synthetic
DQKEELELLILQVEVLFRRIEVLVKRISDEETIRQLQETMERILESLKKALELFRKDPEKALQLAKLALIIAQVLLLFALIWELVAQISDEETIRQLQETMERILESLKKALELFRKDPEKALQLAKLALIIAQVLLLFALIWELVAQISDEETIRQLQETMERILESLKKALELFRKDPEKALQLAKLALIIAQVLLLFALIWELVAQISDEETIRQLQETMERILESLKKALELFRKDPERAESLALRAYYLAHLLLINAREWELS

SEQ ID NO: 1159 - protein, 268 aa, synthetic construct
  REGION 1..268: note = Synthetic
DQRIRLEQIILQVRILFLEIKLLVKEISDEETIRQLQETMERILESLKKALELFRKDPEKALQLAKLALIIAQVLLLFALIWELVAQISDEETIRQLQETMERILESLKKALELFRKDPEKALQLAKLALIIAQVLLLFALIWELVAQISDEETIRQLQETMERILESLKKALELFRKDPEKALQLAKLALIIAQVLLLFALIWELVAQISDEETIRQLQETMERILESLKKALELFRKDPEKALHLAKKAHEDAYVLLVIAKRWEEV

SEQ ID NO: 1160 - protein, 268 aa, synthetic construct
  REGION 1..268: note = Synthetic
DEREQLESIILQVEILFSRIWKLVAQISDEETIRQLQETMERILESLKKALELFRKDPEKALQLAKLALIIAQVLLLFALIWELVAQISDEETIRQLQETMERILESLKKALELFRKDPEKALQLAKLALIIAQVLLLFALIWELVAQISDEETIRQLQETMERILESLKKALELFRKDPEKALQLAKLALIIAQVLLLFALIWELVAQISDEETIRQLQETMERILESLKKALELFRKDPDEAEHLARRAHISARQLILIAEKWELV

SEQ ID NO: 1161 - protein, 268 aa, synthetic construct
  REGION 1..268: note = Synthetic
DQKEELEYIIKRVELLFELIEHLVRKISDEETIRQLQETMERILESLKKALELFRKDPEKALQLAKLALIIAQVLLLFALIWELVAQISDEETIRQLQETMERILESLKKALELFRKDPEKALQLAKLALIIAQVLLLFALIWELVAQISDEETIRQLQETMERILESLKKALELFRKDPEKALQLAKLALIIAQVLLLFALIWELVAQISDEETIRQLQETMERILESLKKALELFRKDPDKALYLALQALLEALDLLRKAERWELV

SEQ ID NO: 1162 - protein, 281 aa, synthetic construct
  REGION 1..281: note = Synthetic
SEEERVETLANEALLLVLRALLQAIHMGDPNYREVARILRELLIEALQTLKEAKEAGDEEMFQQATETIRVILLAAEAALLVVKAYRQAKEMGDPNYLEVARILLELLIEALQTLKEAKEAGDEEMFQQATETIRVILLAAEAALLVVKAYRQAKEMGDPNYLEVARILLELLIEALQTLKEAKEAGDEEMFQQATETIRVILLAAEAALLVVKAYRQAKEMGDPNYLEVARILLELLIEALQTLKEAKEAGDEEMFQQATETIRKILLQAQIALALVRHH

SEQ ID NO: 1163 - protein, 281 aa, synthetic construct
  REGION 1..281: note = Synthetic
TETERVRELALRAELLVREAFNIAELMGDPNYLEVARILLELLIEALQTLKEAKEAGDEEMFQQATETIRVILLAAEAALLVVKAYRQAKEMGDPNYLEVARILLELLIEALQTLKEAKEAGDEEMFQQATETIRVILLAAEAALLVVKAYRQAKEMGDPNYLEVARILLELLIEALQTLKEAKEAGDEEMFQQATETIRVILLAAEAALLVVKAYRQAKEMGDPNYLEVARILLELLIEALQTLKEAKEAGDEEMFQQATETIRKILYQAREALVRVEHH

SEQ ID NO: 1164 - protein, 281 aa, synthetic construct
  REGION 1..281: note = Synthetic
DEERHVQFLAIEAFELVRKAYRQAKEMGDPNYLEVARILLELLIEAEQTLKEAKEAGDEEMFQQATETIRVILLAAEAALLVVKAYRQAKEMGDPNYLEVARILLELLIEALQTLKEAKEAGDEEMFQQATETIRVILLAAEAALLVVKAYRQAKEMGDPNYLEVARILLELLIEALQTLKEAKEAGDEEMFQQATETIRVILLAAEAALLVVKAYRQAKEMGDPNYLEVARILLELLIEALQTLKEAKEAGDEEMFQRAVKLIREILVDALSALTRVRNH

SEQ ID NO: 1165 - protein, 266 aa, synthetic construct
  REGION 1..266: note = Synthetic
SEEENQMKSIVIQAEVIALRAHELAKRAGDEEALELIRIVLQLLTEIVKLSKSGDEETFERALQFAEMILTVAEAVLLALQAYELAKRAGDEEALELIRIVIQLLTEIVKLSKSGDEETFERALQFAEMISTVAEAVLLALQAYELAKRAGDEEALELIRIVIQLLTEIVKLSKSGDEETFKRALKFARMISIVAEAVLLALQAYELAKRAGDEEALELIRIVIQLLTEIVKLSKSGDEETFERAYELALQILFQAEQVLERLQEY

SEQ ID NO: 1166 - protein, 266 aa, synthetic construct
  REGION 1..266: note = Synthetic
SRRELHMHTLIHRALLIALRAHELAKRAGDEEALELIRIVRQLLTEIVKLSKSGDEETFERALQFAEMISTVAEAVLLALQAYELAKRAGDEEALELIRIVIQLLTEIVKLSKSGDEETFERALQFAEMISTVAEAVLLALQAYELAKRAGDEEALELIRIVIQLLTEIVKLSKSGDEETFERALQFAEMISVVAEAVLLALQAYELAKRAGDEEALELIRIVIQLLTEIVKLSKSGDEETFERARELAYRILVNARLVLEFLQRY

SEQ ID NO: 1167 - protein, 266 aa, synthetic construct
  REGION 1..266: note = Synthetic
DEQEVKMKQIVAKALSLALLAESFAHLAGDEEALELIRIVIQLLTEIEKLSKSGDEETFERALQFAEMISTVAEAVLLALQAYELAKRAGDEEALELIRIVIQLLTEIVKLSKSGDEETFERALQFAEMISTVAEAVLLALQAYELAKRAGDEEALELIRIVIQLLTEIVKLSKSGDEETFERALQFAEMISTVAEAVLLALQAYELAKRAGDEEALELIRIVIQLLTEIVKLSKSGDEETFERALQFAEKILYLARLVLLRLEFS

SEQ ID NO: 1168 - protein, 224 aa, synthetic construct
  REGION 1..224: note = Synthetic
DRQEEILLEVLRLLLEAYIIAQLAGDPSFQESVKEILEELQRAFELGDEETMRQLLILAQVLLLLALAFLLAQKAGDPSFQESVKEILEELQRAFELGDEETMRQLLILAQVLLLLALAFLLAQKAGDPSFQESVKEILEELQRAFELGDEETMRQLLILAQVLLLLALAFLLAQKAGDPSFQESVKEILEELQRAFELGDEETMRRLLHLAQRLLLEARIFLE

SEQ ID NO: 1169 - protein, 266 aa, synthetic construct
  REGION 1..266: note = Synthetic
DDQELKMFEIILRAKVLALLAEYLARKAGDEEALELIRIVIQLLTEIVKLSKSGDEETFERALQFAEMISTVAEAVYLALKAYFLAKKAGDEEALELIRIVIQLLTEIVKLSKSGDEETFERALQFAEMISTVAEAVLLALQAYELAKRAGDEEALELIRIVIQLLTEIVKLSKSGDEETFERALQFAEMISIVAEAVLLALQAYELAKRAGDEEALELIRIVIQLLTEIVKLSKSGDEETFERAFRFAIEILNLAHLVLQKLRTS

SEQ ID NO: 1170 - protein, 269 aa, synthetic construct
  REGION 1..269: note = Synthetic
DEEHLRIKYVAIEALLLVHEIERLAKETGDPEYLEVAKTLHELILEMLRISKNAKTEEQFQRALEYLQIILTAAQAALLVLEIYQLAKETGDPEYLEVAKTLLELILEMLRISKNAKTEEQFQRALEYLQIILTAAQAALLVLEIYQLAKETGDPEYLEVAKTLLELILEMLRISKNAKTEEQFQRALEYLQIILTAAQAALLVLEIYQLAKETGDPEYLEVAKTLLELILEMLRISKNAKTEEQFQRALRHLHEIFILAQIALLELHS

SEQ ID NO: 1171 - protein, 269 aa, synthetic construct
  REGION 1..269: note = Synthetic
SDEEDEIRNTARFAEALVRRIYKLAKETGDPEYLEVAKTLLELILEMLRISKNAKTEEQFQRALEYLQIILTAAQAALLVLEIYQLAKETGDPEYLEVAKTLLELILEMLRISKNAKTEEQFQRALEYLQIILTAAQAALLVLEIYQLAKETGDPEYLEVAKTLLELILEMLRISKNAKTDEQFRRALLYLQIILTAAQAALLVLEIYQLAKETGDPEYLEVAKTLLELILEMLRISKNAKTDEQFFHALLVLLQILFEAEQALRVLKS

SEQ ID NO: 1172 - protein, 269 aa, synthetic construct
  REGION 1..269: note = Synthetic
DELELRIRVVAYEAIALVLRIYVLAQETGDPEYLEVAKTLHELILEMLRISKNAKTEEQFQRALEYLQIILTAAQAALLVLEIYQLAKETGDPEYLEVAKTLLELILEMLRISKNAKTEEQFQRALEYLQIILTAAQAALLVLEIYQLAKETGDPEYLEVAKTLLELILEMLRISKNAKTEEQFQRALEYLQIILTAAQAALLVLEIYQLAKETGDPEYLEVAKTLLELILEMLRISKNAKTEEQFQRALRELERILHLAQHALFELRS

SEQ ID NO: 1173 - protein, 269 aa, synthetic construct
  REGION 1..269: note = Synthetic
DTEERHIKVLAIEAENLVRAIEQIAKLTGDPEYLEVAKTLLELILEMLRISKNAKTEEQFQRALEYLQIIYTAALAALLVLQIYFRALLTGDPEYLEVAKTLLELILEMLRISKNAKTEEQFKRALQYLQIILTAAQAALLVLEIYQLAKETGDPEYLEVAKTLLELILEMLRISKNAKTEEQFFKALFYLLIILLAAEAALLVLEIYQLAKETGDPEYLEVAKTLLELILEMLRISKNAKTREQFRRAYEVLARIFLIALEALLELQS

SEQ ID NO: 1174 - protein, 257 aa, synthetic construct
  REGION 1..257: note = Synthetic
DKRDEILIKAFELVLRVKQTAEKLSRQAKNEEEMEQAQEFLEEAVKLWRQARATTDPEELKIILILLQALLLVLLVSLTAIKLSRQAKNEEEMEQAQEFLEEAVKLWRQARATTDPEELKIILILLQALLLVLLVSLTAIKLSRQAKNEEEMEQAQEFLEEAVKLWRQARATTDPEELKIILILLQALLLVLLVSLTAIKLSRQAKNEEQMEEAQEFLEEAVKLWRQARATTDPEELLRILLTLEHLLRVLRLLLES

SEQ ID NO: 1175 - protein, 257 aa, synthetic construct
  REGION 1..257: note = Synthetic
DKREEILRKAHELVLRVESTARLLSEHAKNEEEMEQAQEFLEEAVKLLRQARATTDPEELKIILILLQALLLVLLVSLTAIKLSRQAKNEEEMEQAQEFLEEAVKLWRQARATTDPEELKIILILLQALLLVLLVSLTAIKLSRQAKNEEEMEQAQEFLEEAVKLWRQARATTDPEELKIILILLQALLLVLLVSLTAIKLSRQAKNEEEMEKAQEFLEEAVKLWRQARATTDPEELLHIVVTLLFLLLHLRLQLEL

SEQ ID NO: 1176 - protein, 272 aa, synthetic construct
  REGION 1..272: note = Synthetic
LKFMLIAEEAIHLVAEIFALVFRLKQLARRRGDKEQSKRAQELVEQAEELLEQLQATTDEEELKFMLIAIEAIWLVVLISILVIELSELAKRRGDKEQSKRAQELLEQAVELLRQLMATTDEEELKFMLIAIEAIWLVVLISILVIELSELAKRRGDKEQSKRAQELLEQAVELLRQLMATTDEEELKFMLIAIEAIWLVVLISILVIELSELAKRRGDKEQSKRAQELLEQAVELLRQLMATTDEEELKFMLEEIKKIFHEVRLQIERIRS

SEQ ID NO: 1177 - protein, 259 aa, synthetic construct
  REGION 1..259: note = Synthetic
DNELESLLFRAYAIALEIEELAKEAGSEEMLEAARQVKELVLQAYELTQSGKLPWEEIFRFVELVLLLVLAALIALKIYILAKKAGSEEMLEAARQVIELVLQAYELTQSGKLPWEEIFRFVELVLLLVLAALIALKIYILAKKAGSEEMLEAARQVIELVLQAYELTQSGKLPWEEIFRFVELVLLLVLAALIALKIYILAKKAGSEEMLEAARQVIELVLQAYELTQSGKLPWEEIFRFVRKVLLLVIQALIHLEIS

SEQ ID NO: 1178 - protein, 259 aa, synthetic construct
  REGION 1..259: note = Synthetic
DTELERLLDEAHHIARLIEELAKKAGSEEMLEAARQVIELVLQAYELTQSGKLPWEEIFRFVELVLLLVLAALIALKIYILAKKAGSEEMLEAARQVIELVLQAYELTQSGKLPWEEIFRFVELVLLLVLAALIALKIYILAKKAGSEEMLEAARQVIELVLQAYELTQSGKLPWEEIFRFVELVLLLVLAALIALKIYILAKKAGSEEMLEAARQVIELVLQAYELTQSGKLPWHEIYHFVYHVLLLVRLILDELKQY

SEQ ID NO: 1179 - protein, 224 aa, synthetic construct
  REGION 1..224: note = Synthetic
SEQEILVLEVELLLLRAHHLAQKAGDPSFQESVKEILEELQRAFELGDEETMRQLLILAQVLLLLALAFLLAQKAGDPSFQESVKEILEELQRAFELGDEETMRQLLILAQVLLLLALAFLLAQKAGDPSFQESVKEILEELQRAFELGDEETMHQLLILAQVLLLLALAFLLAQKAGDPSFQERVKEILEELQRAFELGDQELMLELLSQAYVLLERALRFLL

SEQ ID NO: 1180 - protein, 259 aa, synthetic construct
  REGION 1..259: note = Synthetic
FEELRQLLIEAFVIAHTIEILARFAGSEEMLEAARQVIELVLQAYELTQSGKLPWEEIFRFVELVLLLVLAALIALKIYNLAVRAGSEEMLEAARQVIELVLQAYELTQSGKLPWEEIFRFVELVLLLVLAALIALKIYILAKKAGSEEMLEAARQVIELVLQAYELTQSGKLPWEEIFRFVELVLLLVLAALIALKIYILAKKAGSEEMLEAARQVIELVLQAYELTQSGKLPWEEIFKFVKHVLITVLKTLLQLRRY

SEQ ID NO: 1181 - protein, 259 aa, synthetic construct
  REGION 1..259: note = Synthetic
SEELEILLLEAHSIALLIELLARVAGSEEMLEAARQVIELVLQAYELTQSGKLPWEEIFRFVELVLLLVLAALIALRIYLLAHRAGSEEMLEAARQVIELVLQAYELTQSGKLPWEEIFRFVELVLLLVLAALIALKIYILAKKAGSEEMLEAARQVIELVLQAYELTQSGKLPWEEIFRFVELVLILVLAALIALKIYILAKKAGSEEMLEAARQVIELVLQAYELTQSGKLPFEEIYRFVIEVYSIVLEILHELRLL

SEQ ID NO: 1182 - protein, 259 aa, synthetic construct
  REGION 1..259: note = Synthetic
SEELERILDEAHHIALQIKRLAKKAGSEEMLEAARQVIELVLQAYELTQSGKLPWEEIFRFVELVLLLVLAALIALKIYILAKKAGSEEMLEAARQVIELVLQAYELTQSGKLPWEEIFRFVELVLLLVLAALIALKIYILAKKAGSEEMLEAARQVIELVLQAYELTQSGKLPWEEIFRFVELVLLLVLAALIALKIYILAKKAGSEEMLEAARQVIELVLQAYELTQSGKLPWKEIYQFVQQVLFFVRLALVELENS

SEQ ID NO: 1183 - protein, 272 aa, synthetic construct
  REGION 1..272: note = Synthetic
SYRAEVVLRLLENYVHFLLLEFKRASGGDAEKLLQNARELLREALELAKESMKQLGITDATLKELLARIVLSALTLLVQSLLEWFKEASGGDAEKLLQNARELLREALELAKESMKQLGITDATLKELLARIVLSALTLLVQSLLEWFKEASGGDAEKLLQNARELLREALELAKESMKQLGITDATLKELLARIVLSALTLLVQSLLEWFKEASGGDKEKLLQNARELLREALELAKESMKQLGITDATLKELERQIELFANELLLRSLVN

SEQ ID NO: 1184 - protein, 216 aa, synthetic construct
  REGION 1..216: note = Synthetic
DEEELIRILFELAKLFFEYIEHLLRRIKKAGIDVTELEELFQLVREVAQELIKRAKNAKSEEQAHTLARIALLLVLALLIFAEIMEILFRIKQAGIDVTELEELFQLVREVAQELIKRAKNAKSEEQAYTLARIALYLVLALLHFALIMELLFRIKQAGIDVTELEELFQLVREVAQELIKRAKNAKSENEALALALRALALVLELYAIALHLLEL

SEQ ID NO: 1185 - protein, 216 aa, synthetic construct
  REGION 1..216: note = Synthetic
DLLERIRLIFHLARIIFEFIKTLLEIIKQAGIDVTELEELFQLVREVAQELIKRAKNAKSEEQAYTLARIALLLVLALLIFAQIMEILFRIKQAGIDVTELEELFQLVREVAQELIKRAKNAKSEEQAYTLARIALLLVLALLIFAQIMEILFRIKQAGIDVTELEELFQLVREVAQELIKRAKNAKSEEQAYTLARIALRLVEHLLNDALKLLDS

SEQ ID NO: 1186 - protein, 216 aa, synthetic construct
  REGION 1..216: note = Synthetic
DTLEEIEVLLRLAELIFEYIELLLRLIKSAGIDVTELEELFQLVREVAQELIKRAKNAKSEEQAYTLARIALLLVLALLIFAQIMEILFRIKQAGIDVTELEELFQLVREVAQELIKRAKNAKSEEQAYTLARIALLLVLALLIFAQIMEILFRIKQAGIDVTELEELFQLVREVAQELIKRAKNAKSEEQAYELARRALLLVLRLYLHAQEMLQL

SEQ ID NO: 1187 - protein, 216 aa, synthetic construct
  REGION 1..216: note = Synthetic
STLEEIRLIFQQAEAIFYLIRQLLRIIKLAGIDVTELEELFQLVREVAQELIKRAKNAKSEEQAYTLARIALLLVLALLIFAYIMQILFKIKQAGIDVTELEELFQLVREVAQELIKRAKNAKSEEQAYTLARIALLLVLALLTFALIMELLFRIKQAGIDVTELEELFQLVREVAQELIKRAKNAKSEEQAYRLALEALRLVLQLLVFALEALLS

SEQ ID NO: 1188 - protein, 265 aa, synthetic construct
  REGION 1..265: note = Synthetic
DEIKELEVEIRYIAVQVELIIRRLQRSDSQEIREHSRELLELLKEALRLAKQASEAGDPEKLQIALLLVLIVLIAALVMLIILKLQRSDSQEIREHSRELLELLKEALRLAKQASEAGDPEKLQIALLLVLIVLIAALVMLIILKLQRSDSQEIREHSRELLELLKEALRLAKQASEAGDPEKLQIALLLVLIVLIAALVMLIILKLQRSDSQEIREHSRELLEILKEALRLAKQASEAGDPEKLQQALQLVRLVLHLARSALIS

SEQ ID NO: 1189 - protein, 273 aa, synthetic construct
  REGION 1..273: note = Synthetic
SELEHFAYEVRALLLQAHTLLRRIKELNRGDEQMKRIVELALEILRRVLEILLEAIQRGDPKLLELAWWAAQVVYLLALAFLLLTRIKEENRGDEQMKRIVELALEILRRVLEILLEAIQRGDPKLLELAWWAAQVVYLLALAFLLLTRIKEENRGDEQMKRIVELALEILRRVLEILLEAIQRGDPKLLELAWWAAQVVYLLALAFLLLTRIKEENRGDEQMKRIVELALEILRRVLEILLEAIQRGDPRLLIEAFSRALEVLLRAKELLLS

SEQ ID NO: 1190 - protein, 218 aa, synthetic construct
  REGION 1..218: note = Synthetic
SERYRLHVLFHLLELIARETGDEEVIEMAQELLRQAVQYTKRGDDESLERLAEQVRLLLLFLHLILLAKKTGDEEVIEMAQELLRQAVQYTKRGDDESLERLAEQVRLLILFLLLIELAKKTGDEEVIEMAQELLRQAVQYTKRGDDESLKKLAIQVYLLILFLLLIELAKKTGDEEVIEMAQELLRQAVQYTKRGDDESLEKLATRVFELINRLRQS

SEQ ID NO: 1191 - protein, 273 aa, synthetic construct
  REGION 1..273: note = Synthetic
NELERIAFQVRSLLLQAEILLIEIEVINRGDEQMKRIVELALEILRRVLEILLEAIQRGDPKLLELAWWAAQVVYLLALAFLLLTRIKEENRGDEQMKRIVELALEILRRVLEILLEAIQRGDPKLLELAWWAAQVVYLLALAFLLLTRIKEENRGDEQMKRIVELALEILRRVLEILLEAIQRGDPKLLELAWWAAQVVYLLALAFLLLTRIKEENRGDEQMKRIVELALEILRRVLEILLEAIQRGDPKLLEEAHKLAHKVFQRAEQVLLS

SEQ ID NO: 1192 - protein, 273 aa, synthetic construct
  REGION 1..273: note = Synthetic
DELETIALQVRVLLLKAKRLLERIKEENRGDEQMKRIVELALEILRRVLEILLEAIQRGDPKLLELAWWAAQVVYLLALAFLLLTRIKEENRGDEQMKRIVELALEILRRVLEILLEAIQRGDPKLLELAWWAAQVVYLLALAFLLLTRIKEENRGDEQMKRIVELALEILRRVLEILLEAIQRGDPKLLELAWFAAQVVYLLALAFLLLTRIKEENRGDEQMKRIVELALEILRRVLEILLEAIQRGDPHLLLEAFALAVYVFYHARAVLLS

SEQ ID NO: 1193 - protein, 273 aa, synthetic construct
  REGION 1..273: note = Synthetic
DELEKIATQVHLLLLRARELLQRIKEENRGDEQMKRIVELALEILRRVLEILLEAIQRGDPKLLELAWWAAQVVYLLALAFLLLTRIKEENRGDEQMKRIVELALEILRRVLEILLEAIQRGDPKLLELAWWAAQVVYLLALAFLLLTRIKEENRGDEQMKRIVELALEILRRVLEILLEAIQRGDPKLLELAWWAAQVVYLLALAFLLLTRIKEENRGDEQMKRIVELALEILRRVLEILLEAIQRGDPKLLRRAHNLAEIVFLLARIFLLS

SEQ ID NO: 1194 - protein, 273 aa, synthetic construct
  REGION 1..273: note = Synthetic
DELERWFLEVEVLLNSARSFLKFIEQHNRGDEQMKRIVELALEILRRVLEILLEAIQRGDPKLLELAWWAAQVVLLLALAFVLLTKIKHENRGDEQMKRIVELALEILRRVLEILLEAIQRGDPKLLELAWWAAQVVYLLALAFLLLTRIKEENRGDEQMKRIVELALEILRRVLEILLEAIQRGDPHLLRLAWFAAFVVYILALAFLLLTRIKEENRGDEQMKRIVELALEILRRVLEILLEAIQRGDPRLLFEALQLALHVFLEAQFLLES

SEQ ID NO: 1195 - protein, 296 aa, synthetic construct
  REGION 1..296: note = Synthetic
SEAEELINEAAALLTQLYILLLELEERYKRTGDESLEKMQELVRQAIKQIKELIERALRLLVAGNEESVRAVALIAQALFLLYQLKIQLLQLEERYKRTGDESLEKMQELVRQAIKQIKELIERAEELLQAGNVESVIAVALIAQALFLLYQLKIQLLQLEERYKRTGDESLEKMQELVRQAIKQIKELIERAEELLQAGNVESVIAVALIAQALFLLYQLKIQLLQLEERYKRTGDELLERMQELVRQAIKLIKELIERAEELLQAGNVEEVERIANIAHLIFLFYEHLIRQLES

SEQ ID NO: 1196 - protein, 296 aa, synthetic construct
  REGION 1..296: note = Synthetic
SLAEELIEEALELLARLEYLLIELEDRYKRTGDESLEKMQELVRQAIKQIRELIRLAIQLLNAGNVESVIAVALIAQALFLLYQLKIQLLQLEERYKRTGDESLEKMQELVRQAIKQIKELIERAEELLQAGNVESVIAVALIAQALFLLYQLKIQLLQLEERYKRTGDESLEKMQELVRQAIKQIKELIERAEELLQAGNVESVIAVALIAQALFLLYQLKIQLLQLEERYKRTGDESLEKMQELVRQAIKQIKELIERAEELLQAGNVESVERVARRAQNIFFLYQFLIRELEN

SEQ ID NO: 1197 - protein, 231 aa, synthetic construct
  REGION 1..231: note = Synthetic
DQNEEIEYLLREAEQMSKEAAELYILVKQAGDEEALELLKQTLRLVYEALERVFREFLELFEQGSFEQLLQNAKILSLLATAASMSAEAALLYILVKQAGDEEALELLKQTLRLVYEALERVFREFLELFEQGSFEQLLQNAKILSLLATAASFSAEAALLYILVKQAGDEEALELLKQILRLVYEHLERIFREFLELFEQGSFEQLLHLARLLSLHAILASIAAQLALLS

SEQ ID NO: 1198 - protein, 253 aa, synthetic construct
  REGION 1..253: note = Synthetic
DELAEEARLLIHRAETLMKRLLESSNPELRELAQEISETLKELIQRLKEENSPEVLRLVILALEALILILRAIQLMQKLLESSNPELRELAQEISETLKELIQRLKEENSPEVLRLVILALEALILILRAIQLMQKLLESSNPELRELAQEISETLKELIQRLKEENSPEVLRLVILALEALILILRAIQLMQKLLESSNPELRELAQEISETLKELIQRLKEENSPHVLRRVINLLLRIIAELNLIELEQES

SEQ ID NO: 1199 - protein, 260 aa, synthetic construct
  REGION 1..260: note = Synthetic
DKREKILELVYHHLILLLTIAFRLKQRGADSELAQKVEELFERLMEIFQRVREAGDPELLKQVLISARVATMLAILALIAAELKKMGADSELAQKVEELFERLMEIFQRVQEAGDPELLKQVLISARVATMLAILALIAAELKKMGADSELAQKVEELFERLMEIFQRVQEAGDPELLKQVLISARVATMLAILALIAAELKKMGADSELAQKVEELFERLMEIFQRVQEAGDPELLKRVELIAELAVTLAQFALIKARS

SEQ ID NO: 1200 - protein, 260 aa, synthetic construct
  REGION 1..260: note = Synthetic
DEREEIERFVLSVLVFLRYLAEQLKKRGADSELAQKVEELFERLMEIFQRVQEAGDPELLKQVLISARVATMLAILAFIAAELKKMGADSELAQKVEELFERLMEIFQRVQEAGDPELLKQVLISARVATMLAILALIAAELKKMGADSELAQKVEELFERLMEIFQRVQEAGDPELLRQVLISARVATMLAILALIAAELKKMGADSELAQKVEELFERLMEIFQRVQEAGDPELLTEVLALAIRATLLAESALERAES

SEQ ID NO: 1201 - protein, 219 aa, synthetic construct
  REGION 1..219: note = Synthetic
YDLLKELFYLVRAAIENIKEAGDEESTEFLKRVLEQIKELQKAGDIEEAILYALLAILFALVTNNIRQIQRAGDEESTEFLKRVLEQIKELQKAGDIEEAILYALLAILFALVTLMIRRIQEAGDEESTEFLKRVLEQIKELQKAGDIEEAILYARLAILFALVTLMIRRIQEAGDEESTEFLKRVLEQIKELQKAGDILRAIYLALRALVYAHFTELS

SEQ ID NO: 1202 - protein, 260 aa, synthetic construct
  REGION 1..260: note = Synthetic
SERQRIKTLVHFHLLELKIIAEELKKIGADSELAQKVEELFERLMEIFQRVQEAGDPELLKQVLISARVATMLAILAFIAAELKKMGADSELAQKVEELFERLMEIFQRVQEAGDPELLKQVLISARVATMLAILALIAAELKKMGADSELAQKVEELFERLMEIFQRVQEAGDPELLRQVLISARVATMLAILALIAAELKKMGADSELAQKVEELFERLMEIFQRVQEAGDPELLNRVEAEAHFATSLAEEALERAEL

SEQ ID NO: 1203 - protein, 254 aa, synthetic construct
  REGION 1..254: note = Synthetic
DIEQTELEHLIHLIRLLAESLKQAGVPEEIIETVLELVKRLAELAKQAQEENDPETLKKLSETAKLLLLILLIAYLAMVLRQAGVPEEIIETVLELVKRLAELAKQAQEENDPETLKRLSTTAKLLLLILLIARLAMQLRRAGVPEEIIETVLELVKRLAELAKQAQEENDPELLLELILTALLLLLILLIALLAMLLRRAGVPEEIIETVLELVKRLAELAKQAQEENDPETLLRLILIALRLLLILLRALAR

SEQ ID NO: 1204 - protein, 242 aa, synthetic construct
  REGION 1..242: note = Synthetic
DEEKYKALELVLRIQAIISRLREAGVPEEVVQLLLEALLEMLRIIKTSTDPRDIQKAYETLRALLLVAEIALIILELKRAGVPEEVVQLLLEALLEMLRIIKTSTDPRDIQKAYETLRALLLVAEIALIILELKRAGVPEEVVQLLLEALLEMLRIIKTSTDPRDIQKAYETLRALLLVAEIALIILELKRAGVPEEVVQLLLEALLEMLRIIKTSTDPRDIQKAYKVLRELLYIAELALFS

SEQ ID NO: 1205 - protein, 242 aa, synthetic construct
  REGION 1..242: note = Synthetic
DFERQSAEILVQLIEIHIRHLKKAGVPEEVVQLLLEALLEMLRIIKTSTDPRDIKKAYETLRALLLVAIIALIILALERAGVPEEVVQLLLEALLEMLRIIKTSTDPRDILHAYLTLRALLLVAEIAYIILELKRAGVPEEVVQLLLEALLEMLRIIKTSTDPRDISRAYNTLLALLLVAEIALIILELKRLGVPEEVVQLLLEALLEMLRIIKTSTDPEDILQAFLILLQLLHIALEARLS

SEQ ID NO: 1206 - protein, 242 aa, synthetic construct
  REGION 1..242: note = Synthetic
DYEKNRAEILVFLIELLIRHLKQAGVPEEVVQLLLEALLEMLRIIKTSTDPRDIQKAYETLRALLLVALIALIILELKRAGVPEEVVQLLLEALLEMLRIIKTSTDPRDIRRAYLTLRALLLVAEIALIILRLKRAGVPEEVVQLLLEALLEMLRIIKTSTDPRDIRKAYQTLQALLLVAEIALIILELKRAGVPEEVVQLLLEALLEMLRIIKTSTDPRDIKRAFDILLHLLRIAEEALLS

SEQ ID NO: 1207 - protein, 252 aa, synthetic construct
  REGION 1..252: note = Synthetic
DKLRRIREEVRELIYKIEIIMEHLFERLNDEEVRRTIEKIFELIQIAAQLAKSKDPKDAKLALIIAQVALLIVVIFELMERLFERLNDEEVRRTIEKIFELIQIAAQLAKSKDPKDAKLALIIAQVALLIVVIFELMERLFERLNDEEVRRTIEKIFELIQIAAQLAKSKDPKDAKLALIIAQVALLIVVIFELMERLFERLNDEEVRRTIEKIFELIQIAAQLAKSKDPKDAKLARRIARRALLIVELFET

SEQ ID NO: 1208 - protein, 240 aa, synthetic construct
  REGION 1..240: note = Synthetic
DEAKRELEYSVRAFVYRIILRMRRAGVSIEEIVKEIFKTAVRLAKIAIEENGMTEEQQEELIERAAKLVLEIIVREAVKEIIQRMRQAGVSIEEIVKEIFKTAVRLAKIIIEQFGMTEEQQEELIERAAKLVLEIIVREAVKEIIQRMRQAGVSIEEIVKEIFKTAVRLAKIIIEQFGMTEEQQEELIERAAKLVLEIIRREAVKEIIQRMRQAGVSKKEIREEIIETILRLFKIIYRLL

SEQ ID NO: 1209 - protein, 257 aa, synthetic construct
  REGION 1..257: note = Synthetic
SEIEQLIIHAENVINEARIILEELEKLGMDEELIEKLKELLEIALQLLIEAARQGDEETARIVLIIVQALLVILKASYILMRLKQLGMDEELIEKLKELLEIALQLLIEAARQGDEETARIVLIIVQALLVILKASYILMRLKQLGMDEELIEKLKELLEIALQLLIEAARQGDEETARIVLIIVQALLVILKASYILMRLKQLGMDEELIEKLKELLEIALQLLIEAARQGDEETARRVLLLVLQLLLELLLLLLS

SEQ ID NO: 1210 - protein, 257 aa, synthetic construct
  REGION 1..257: note = Synthetic
DRIEEIILEAQFVIYEAEHILYKLELLGMDEELIEKLKELLEIALQLLIEAARQGDEETARIVLIIVQALLVILKASYILMRLKQLGMDEELIEKLKELLEIALQLLIEAARQGDEETARIVLIIVQALLVILKASYILMRLKQLGMDEELIEKLKELLEIALQLLIEAARQGDEETARIVLIIVQALLVILKASYILMRLKQLGMDEELIEKLKELLEIALQLLIEAARQGDERTAREVLLLVLELLIRLLQLLLS

SEQ ID NO: 1211 - protein, 260 aa, synthetic construct
  REGION 1..260: note = Synthetic
AQMERILSEAQRVLLQVEVILHHLELENGWSEELEQFFELLRRLLKLLLEAALQGDPRLAQMVLILALALLILALVTLILVRLTKENGWSEELEQFFELLRRLLKLLLEAALQGDPRLAQMVLILALALLILALVTLILVRLTKENGWSEELEQFFELLRRLLKLLLEAALQGDPRLAQMVLILALALLILALVTLILVRLTKENGWSEELEQFFELLRRLLKLLLEAALQGDPRLAEEVLRLARRLLALAEILLLEVRS

SEQ ID NO: 1212 - protein, 219 aa, synthetic construct
  REGION 1..219: note = Synthetic
SEELELLFYLVKIFIEIIQKAGDEESTEFLKRVLEQIKELQKAGDIEEAILYALLAILFALVTLNILIIQRAGDEESTEFLKRVLEQIKELQKAGDIEEAIDYALLAILFALVTRMIRRIQEAGDEESTEFLKRVLEQIKELQKAGDITEALLYALLAILFALVTLMIRRIQEAGDEESTEFLKRVLEQIKELQKAGDIREALVLAYEAILYAERTERS

SEQ ID NO: 1213 - protein, 254 aa, synthetic construct
  REGION 1..254: note = Synthetic
DDLHFEALLLLLEAELILRRLKRLGMDEEILQEIKEAIQIVLELLKEASRRGDPEKVRLAVLLAQALLLLVQALYFLMRLKQLGMDEEILQEIKEAIQIVLELLKEASRRGDPEKVRLAVLLAQALLLLVQALYFLMRLKQLGMDEEILQEIKEAIQIVLELLKEASRRGDPEKVRLAVLLAQALLLLVQALYFLMRLKQLGMDEEILQEIKEAIQIVLELLKEASRRGDPEKVRLAVRLAELLLDQVRYLFLS

SEQ ID NO: 1214 - protein, 254 aa, synthetic construct
  REGION 1..254: note = Synthetic
SELLIEARLLLLEAEYILELLKELGMDEEILQEIKEAIQIVLELLKEASRRGDPEKVRLAVLLAQALLLLVQALYFLMRLKQLGMDEEILQEIKEAIQIVLELLKEASRRGDPEKVRLAVLLAQALLLLVQALYFLMRLKQLGMDEEILQEIKEAIQIVLELLKEASRRGDPEKVRLAVLLAQALLLLVQALYFLMRLKQLGMDEEILQEIKEAIQIVLELLKEASRRGDPRKVFKAVTLARELLVRVQHLYYS

SEQ ID NO: 1215 - protein, 254 aa, synthetic construct
  REGION 1..254: note = Synthetic
DELEIEARILLHTAELVLRHLKELGMDEEILQEIKEAIQIVLELLKEASRRGDPEKVRLAVLLAQALLLLVLALLYLLTLKRLGMDEEILQEIKEAIQIVLELLKEASRRGDPEKVHLAVLLAQALLLLVQALYFLMRLKQLGMDEEILQEIKEAIQIVLELLKEASRRGDPRLVFLAVLLALALLLLVQALYFLMRLKQLGMDEEILQEIKEAIQIVLELLKEASRRGDPEKVVRAVSLATELLNLVRLLFER

SEQ ID NO: 1216 - protein, 254 aa, synthetic construct
  REGION 1..254: note = Synthetic
DELIQEAKSLLEDARFYLELLKRLGMDEEILQEIKEAIQIVLELLKEASRRGDPEKVRLAVLLAQALLLLVQALYFLMRLKQLGMDEEILQEIKEAIQIVLELLKEASRRGDPEKVRLAVLLAQALLLLVQALYFLMRLKQLGMDEEILQEIKEAIQIVLELLKEASRRGDPQKVRLAVLLAIALLLLVQALYFLMRLKQLGMDEEILQEIKEAIQIVLELLKEASRRGDPRKVIRAVSLALELLLVVEQLYLS

SEQ ID NO: 1217 - protein, 257 aa, synthetic construct
  REGION 1..257: note = Synthetic
DELKLRIKQLALEALILALEVHRKATSEEDTEIVQFIREQIKELLQRLAKATSPETLKWLYMSFRILILALQAILLALEVLEKATSEEDTEIVQFIIEQIKELLQRLAKATSPETLKWLYMSFRILILALQAILLALEVLEKATSEEDTEIVQFIIEQIKELLQRLAKATSPETLKWLYMSFRILILALQAILLALEVLEKATSEEDTEIVQFIIEQIKELLQRLAKATSPETLKRLYLTFRILIHYLRFILLRLEL

SEQ ID NO: 1218 - protein, 257 aa, synthetic construct
  REGION 1..257: note = Synthetic
DEERLEIKQLANEALRLALEVRRKATSEEDTEIVQFIREQIKELLQRLAKATSPETLKWLYMSFRILILALQAILLALEVLEKATSEEDTEIVQFIIEQIKELLQRLAKATSPETLKWLYMSFRILILALQAILLALEVLEKATSEEDTEIVQFIIEQIKELLQRLAKATSPETLKWLYMSFRILILALQAILLALEVLEKATSEEDTEIVQFIIEQIKELLQRLAKATSPETLKWLYMSFRRLIHILRVILYRLEL

SEQ ID NO: 1219 - protein, 288 aa, synthetic construct
  REGION 1..288: note = Synthetic
AKLELLLQQVQHYATLVRYLLQLIHLFVQEHGMPEEWEQNIKELTEMLRTAEESAFEALKRNDPELAKLALLLAQVVYYAASVLWLLLLILEFVQRHGMPEEWEQNIKELTEMLRTALESAFEALKRNDPELAKLALLLAQVVYYAASVLWLLLLILEFVQRHGMPEEWEQNIKELTEMLRTALESAFEALKRNDPELAKLALLLAQVVYYAASVLWLLLLILEFVQRHGMPEEWEQNIKELTEMLRTALESAFEALKRNDPELAKLALLLARHVFILAQILLLRLEL

SEQ ID NO: 1220 - protein, 288 aa, synthetic construct
  REGION 1..288: note = Synthetic
SKLERLYTLVLRLAADVRALLEHIRIFVEQHGMPEEWEQNIKELTEMLRTAEESAHEALKRNDPELAKLALLLAQVVYYAASVLVLLLLILEFVQRHGMPEEWEQNIKELTEMLRTALESAFEALKRNDPELAKLALLLAQVVYYAASVLWLLLLILEFVQRHGMPEEWEQNIKELTEMLRTALESAFEALKRNDPELAKLALLLAQVVYYAASVLWLLLLILEFVQRHGMPEEWEQNIKELTELLRTALESAFEALKRNDPELAKQALLLAIHVFLEALVLLTRLRL

SEQ ID NO: 1221 - protein, 288 aa, synthetic construct
  REGION 1..288: note = Synthetic
DELEELLTLVRVLAHYVEVILELILEFVQRHGMPEEWEQNIKELTEMLRTALESAFEALKRNDPELAKLALLLAQVVYYAASVLHLLLLILEFVQRHGMPEEWEQNIKELTEMLRTALESAFEALKRNDPELAHLALLLAQVVYYAASVLWLLLLILEFVQRHGMPEEWEQNIKELTEMLRTALESAFEALKRNDPRLALLALLLAQVVYYAASVLWLLLLILEFVQRHGMPEEWEQNIKELTEMLRTALESAFEALKRNDPRLALEALTLAIHVFLRAKLDWLELKS

SEQ ID NO: 1222 - protein, 289 aa, synthetic construct
  REGION 1..289: note = Synthetic
AELELIAESVNKFILLVEYILILLLQFMKRHGYPEELKQTIEEILQVIREALQQVYEALERGDPKTAELALIAASVALFIALVSLILLRLLEFMKRHGYPEELKQTIEEILQVIREALQQVYEALERGDPKTAELALIAASVALFIALVSLILLRLLEFMKRHGYPEELKQTIEEILQVIREALQQVYEALERGDPKTAELALIAASVALFIALVSLILLRLLEFMKRHGYPEELKQTIEEILQLIREALQQVYEALERGDPKTAELALIAAEKALLLALISLLELRYS

SEQ ID NO: 1223 - protein, 249 aa, synthetic construct
  REGION 1..249: note = Synthetic
DELKRLENRLKLLLDEVKELAKQAGSEVFEEALRMAQELVKRVLELLRQGNYEEARKFAELALLVLLLILLLLKVKQLAKQAGSEVFEEALRMAQELVKRVLELLRQGNYEEARKFAELALLVLLLILLLLLVKQLAKQAGSEVFEEALRMAQELVKRVLELLRQGNYEEARRFAELALLVLLLILLLLLVKQLAKQAGSELFEELLRMAQELVKRVLELLRQGNYEEALQHATRALATLLVIRTLVEL

SEQ ID NO: 1224 - protein, 289 aa, synthetic construct
  REGION 1..289: note = Synthetic
DELEKIARSVKKFIFQVRAILELLLEFMKRHGYPEELKQTIEEILQVIREALQQVYEALERGDPKTAELALIAASVALFIALVSLILLELLEFMKRYGYPEELKQTIEEILQVIREALQQVYEALERGDPKTAELALIAASVALFIALVSLILLELLEFMKRHGYPEELKQTIEEILQVIREALQQVYEALERGDPKTARLALIAAAVALFIALVSLILLRLLEFMKRHGYPEELKQTIEEILQVIREALQQVYEALERGDPKTASEAYQLAVQALTLAHLSLFELENS

SEQ ID NO: 1225 - protein, 273 aa, synthetic construct
  REGION 1..273: note = Synthetic
DEAEELRQEAEVIFNVVRTLLKVLRENVTDEEKVLKRIEEVTQLLKEALEKLLEALRQGDIELVYAAYLALQAAYYFVRVSLLLYHLRRRVTDEEKVLKRIEEVTQLLKEALEKLLEALRQGDIELVYAAYLALQAAWYFVVVSILLWILRQLVTDEEKVLKRIEEVTQLLKEALEKLLEALRQGDIELVYAAYLALQAAWYFVVVSILLWILRQLVTDEEKVLKRIEEVTQLLKEALEKLLEALRQGDIELVYRAFLLLLEAYLIVIRSLLS

SEQ ID NO: 1226 - protein, 273 aa, synthetic construct
  REGION 1..273: note = Synthetic
DEAEQLARHAEVIFQIVSHLLRKLRQLVTDEEKVLKRIEEVTQLLKEALEKLLEALRQGDIELVYAAYLALQAALYFVRVSLLLWILRQLVTDEEKVLKRIEEVTQLLKEALEKLLEALRQGDIELVYAAYLALQAAWYFVVVSILLWILRQLVTDEEKVLKRIEEVTQLLKEALEKLLEALRQGDIELVYAAYLALQAAWYFVVVSILLWILRQLVTDEEKVLKRIEEVTQLLKEALEKLLEALRQGDIRRVRRAYNLLVQAFLIVRTELQS

SEQ ID NO: 1227 - protein, 253 aa, synthetic construct
  REGION 1..253: note = Synthetic
SRKIHAFVFLIEIFLLLEELLLRVKERGDEEAIESIRKAIELARQMIQELKTATTEEQYRKALAVAFLLFILALLFLLLLRVKERGDEEAIESIRKAIELARQMIQELKTATTEEQYRKALAVAFLLLILALLFLLLLRVKERGDEEAIESIRKAIELARQMIQELKTATTEEQYRKALAVAFLLLILALLFLLLLRVKERGDEEAIEEIRKAIELARQMIQELKTATTEEQYHKAYHTAQLLLHLAELFLKS

SEQ ID NO: 1228 - protein, 253 aa, synthetic construct
  REGION 1..253: note = Synthetic
DRKALAHHFLLEIYILLILLLLRVKERGDEEAIESIRKAIELARQMIQELRTATTEEQYRKALAVAFLLLILALLFLLLLRVKERGDEEAIESIRKAIELARQMIQELKTATTEEQYRKALAVAFLLLILALLFLLLLLVKERGDEEAIESIRKAIELARQMIQELKTATTEEQYRKALAVAFLLLILALLFLLLLLVKERGDEEAIESIRKAIELARQMIQELKTATTEEQYRHAYQVAFELVTLAESFLLS

SEQ ID NO: 1229 - protein, 298 aa, synthetic construct
  REGION 1..298: note = Synthetic
DIELLELYHEARILSARIRYLTELIRKLLPPGESEKQTQIFQELLEAIQQILKRAVELTQRGNTEEAETFMRLAVLLAIAVVLSAEIIRLTEEIRKLLPPGESEKQTQIFQELLEAIQQILKRAVELTQRGNTEEAETFMRLAVLLAIAVVLSAEIIRLTEEIRKLLPPGESEKQTQIFQELLEAIQQILKRAVELTQRGNTEEAETFMRLAVLLAIAVVLSAEIIRLTEEIRKLLPPGESEKQTQIFQELLEEIQQVLKRAVELTQRGNTEEAERFMRYAVILAKIVVLLAELIKNS

SEQ ID NO: 1230 - protein, 249 aa, synthetic construct
  REGION 1..249: note = Synthetic
SELDELVFRLEYLLKLVKELAKQAGSEVFEEALRMAQELVKRVLELLRQGNYEEARKFAELALLVLLLIELLLLVKQLAKQAGSEVFEEALRMAQELVKRVLELLRQGNYEEARKFAELALLVLLLILLLLLVKQLAKQAGSEVFEEALRMAQELVKRVLELLRQGNYEEARKFARLALLVLLLILLLLLVKQLAKQAGSEQFERALREAQELVKRVLELLRQGNYEEAQRHALEALYILLLILELLLH

SEQ ID NO: 1231 - protein, 219 aa, synthetic construct
  REGION 1..219: note = Synthetic
DELERRLLKLLIELEFLARQAGSEEMRQLAREIIEFIEKVLRTGDEEQLKQAELLARLVLLLIKLLQLAREAGSEEMRQLAREIIEFIEKVIRTGDEEQLKQAELLARLVLLLIKLLQLAREAGSEEMRQLAREIIEFIEKVIRTGDEEQLKQAELLARLVLLLIKLLQLAREAGSEKMRQEAREIIEFIEKVIRTGDHEQLTRALNLALLVLNIIKHH

SEQ ID NO: 1232 - protein, 222 aa, synthetic construct
  REGION 1..222: note = Synthetic
DKTDLLAARIVYVLILVILIALRYGDPEQAEQAREMIERVIEFAYRGGEEVKIFLTAFLILAILLLVYLFAKQYGDPEQAEQAQEMIERVLEYARRGGEEVKIFLTAFLILAILLLVYLFAKQYGDPEQAEQAQEMIERVLEYARRGGEEVKIFLTAFLILAILLLVYLLAKRVGDPEQAEQAQEMIERVLEYARRGGEEVKEFLLRFLQIALSLLTYLENL

SEQ ID NO: 1233 - protein, 219 aa, synthetic construct
  REGION 1..219: note = Synthetic
DELELELRQLVIEIEFLIRQANSPEFRELAQRILEEAYKALKTGDEEQIRQAILMAILVSLVILIYQLIKEANSPEFRELAQRILEEAYKAIKTGDEEQIRQAILMAILVSLVILIYQLIKEANSPEFRELAQRILEEAYKAIKTGDEEQIRQAILMAILVSLVILIYQLIKEANSPEFRELAQRILEEAYKAIKTGDEEQIRKAISLAEFVSRDIKIQ

SEQ ID NO: 1234 - protein, 219 aa, synthetic construct
  REGION 1..219: note = Synthetic
DELELELETLVHHIRLLIRHANSPEFRELAQRILEEAYKALKTGDEEQIRQAILMAILVSLVIRIYLLILKANSPEFRELAQRILEEAYKAIKTGDEEQIRQAIRMAILVSLVILIYQLIKEANSPEFRELAQRILEEAYKAIKTGDEEQIKQAILMAILVSLVILIYQLIKEANSPEFRELAQRILEEAYKAIKTGDEEQILHAILQAERVSREIREY

SEQ ID NO: 1235 - protein, 222 aa, synthetic construct
  REGION 1..222: note = Synthetic
SEELRLFEEALRFVFLIEALALTLGDPEMVKSAEQLREDIERVQEAGDMEKLRQLLLFAQAFYWVLLIYSLALELGDPEMVKSAEQLLEDIQRVKEAGDMEKLRQLLLFAQAFYWVLLIYILAKELGDPEMVKSAEQLLEDIQRVKEAGDMEKLRQLLLFARAFYYVLLIYLLAKELGDPEMVKSAEQLLEDIQRVKEAGDHEKLQELYLQAVEIFYRLQFL

SEQ ID NO: 1236 - protein, 221 aa, synthetic construct
  REGION 1..221: note = Synthetic
DELSIRLFALLAAVEVYARFLGDPELEKSVERLRELAKQAEQTGDLETLKFIMLSALLFYLLALVLLHAKLLGDPELEKSVERLLELAKQAEQTGDLETLKFIMLSALLFWLLAQVLKYARKLGDPELEKSVERLLELAKQAEQTGDLETLHFIMLSAELFWLLAQVLEYARKLGDPELEKSVERLLELAKQAEQTGDRETLKRILELAQRLFVEARSIEL

SEQ ID NO: 1237 - protein, 219 aa, synthetic construct
  REGION 1..219: note = Synthetic
DEREIKAQTLVRLVETSARRTGDPEFKEMAKQLFEKLVEAIQRGDMEEIEKILRQLRALLLVLLVMLSARETGDPEFKEMAKQLFEKLVEAIQRGDEKEIIRILIQLEALLLVLQVMKSARETGDPEFKEMAKQLFEKLVEAIQRGDREEILHILYQLRALLLVLQVMKSARETGDPEFKEMAKQLFEKLVEAIQRGDERTIAEILILLERLLLELELS

SEQ ID NO: 1238 - protein, 219 aa, synthetic construct
  REGION 1..219: note = Synthetic
DEREIEALVLVFAVRLYAELTGDPEFKEMAKQLFEKLVEAIQRGDMEEIEKILQQLRALLLVLRVMYLARLTGDPEFKEMAKQLFEKLVEAIQRGDMEEIKHILLQLRALLLVLLVMISARETGDPEFKEMAKQLFEKLVEAIQRGDSEEIQHILQQLLALLLVLQVMKSARETGDPEFKEMAKQLFEKLVEAIQRGDQEEILRIYAQLLHLLERLELS

SEQ ID NO: 1239 - protein, 219 aa, synthetic construct
  REGION 1..219: note = Synthetic
SELEIELRRLVLEAKLAAEQAGDPEFRETVRQLFEKMVEAVEAGDEESLKKIYLQLLLLLLVIRALLYARKAGDPEFRETVRQLFEKMVEAVEAGDEESLKKIYLQLLLLLLVIRALLYARQAGDPEFRETVRQLFEKMVEAVEAGDEESLRKIYLQLQLLLLVIRALLYARQAGDPEFRETVRQLFEKMVEAVEAGDEESLIEIYILLLRLLYRIRQL

SEQ ID NO: 1240 - protein, 219 aa, synthetic construct
  REGION 1..219: note = Synthetic
SELEELLLRLVRRAETYAEQAGDPEFRETVRQLFEKMVEAVEAGDEESLKKIYLQLLLLLLVIRALLYARRAGDPEFRETVRQLFEKMVEAVEAGDEESLKKIYLQLLLLLLVIRALLYARQAGDPEFRETVRQLFEKMVEAVEAGDEESLKKIYLQLQLLLLVIRALLYARQAGDPEFRETVRQLFEKMVEAVEAGDEESLREIYLLLLHLLLRIKLL

SEQ ID NO: 1241 - protein, 228 aa, synthetic construct
  REGION 1..228: note = Synthetic
DKEIIELFREVLRLLEIAQRLGDEEATKTAKEALQLLREAFKTGDEELLEKVKELIRQVRLMIEVIQLLEIAQRLGDEEATKTAKEALQLLIEARRTGDEELLEKVKELIRQVRLMIEVIQLLEIAQRLGDEEATKTAKEALQLLIEARRTGDEELLEKVKELIRQVRLMIEVIQLLEIAQRLGDEEATKTAKEALQLLIEARRTGDQRLLNIVEALIKLVRLLIEDS

SEQ ID NO: 1242 - protein, 228 aa, synthetic construct
  REGION 1..228: note = Synthetic
DELEYKLFELVLRLLLIARQLGDEEATKTAKEAYQLLEEARRTGDEELLEKVKELIRQVRLMIEVIQLLEIAQRLGDEEATKTAKEALQLLIEARRTGDEELLEKVKELIRQVRLMIEVIQLLEIAQRLGDEEATKTAKEALQLLIEARRTGDEELLEKVKELIRQVRLMIEVIQLLEIAQRLGDEEATKTAKEALQLLIEARRTGDKRLLLRVEALIRLVELLIRHS

SEQ ID NO: 1243 - protein, 262 aa, synthetic construct
  REGION 1..262: note = Synthetic
DIEEEKAIKLAALARYILLVLKLLYQRTGDPMAKELMETARELIERLEEVLRRGDEEKIRQLIEQIKALLYAFKAFEILQKLKQLYQETGDPMAKELMETARELVERLLEVLRRGDEEKIRQLIEQIKALLYAFKAFEILQKLKQLYQETGDPMAKELMETARELVERLLEVLRRGDEEKIRQLIEQIKALLYAFKAFEILQKLKQLYQETGDPMAKELMETARELVERLLEVLRRGDEEKIRQLILNIKYLLDQFKLFEES

SEQ ID NO: 1244 - protein, 228 aa, synthetic construct
  REGION 1..228: note = Synthetic
DEEIYELLLRVLRLLLIARQLGDEEATKTAKEALQLLREARRTGDEELLEKVKELIRQVRLMIEVIQLLEIAQRLGDEEATKTAKEALQLLIEARRTGDEELLEKVKELIRQVRLMIEVIQLLEIAQRLGDEEATKTAKEALQLLIEARRTGDEELLEKVKELIRQVRLMIEVIQLLEIAQRLGDEEATKRAKEALQLLIEARRTGDEELLLRVKSIIEYVRKLIEVI

SEQ ID NO: 1245 - protein, 226 aa, synthetic construct
  REGION 1..226: note = Synthetic
DILRRRADELALRLYHILNVAKEKGDEIYQLARIAIESVKEALESGDEETLQLVILMAIAVLLAFELSEILRKAKENGDEIYQLARIAIESVKEALESGDEETLQLVILMAIAVLLAFELSEILRKAKENGDEIYQLARIAIESVKEALESGDEETLQLVILMAIAVLLAFELSEILRKAKENGDEIYQLARIAIESVKEALESGDEETLRRVILEARLVLILFRL

SEQ ID NO: 1246 - protein, 233 aa, synthetic construct
  REGION 1..233: note = Synthetic
DEIEKLELDAHVIVFELELLAEQLGDPETTRIARELLQKVIELTQNGDKEEIRKMIEIALLLLLAIRIVLRLLELAKQLGDPETTRIARELLQKVIELTQNGDKEEIRKMIEIALLLLLAIEIVQRLLELAKQLGDPETTRIARELLQKVIELTQNGDKEEIRKMIEIALLLLLAIEIVQRLLELAKQLGDPETTRIARELLQKVIELTQNGDLEEIQRMILEARQLLREIEI

SEQ ID NO: 1247 - protein, 233 aa, synthetic construct
  REGION 1..233: note = Synthetic
DEIERLRRLAELIVRYLESLAEHLGDPETTRIARELLQKVIELTQNGDKEEIRKMIEIALLLLLAIEIVLRLLELAKELGDPETTRIARELLQKVIELTQNGDKEEIRKMIEIALLLLLAIEIVQRLLELAKQLGDPETTRIARELLQKVIELTQNGDKEEIRRMIEIALLLLLAIEIVQRLLELAKQLGDPETTRIARELLQKVIELTQNGDLTKIIEAIARARHLLEEIES

SEQ ID NO: 1248 - protein, 222 aa, synthetic construct
  REGION 1..222: note = Synthetic
SEQEIRFKQVHLLLEEAHDLARQAGDPKALELVERILEEALRALREGDKETLEQLLLFVEVILMLLRAYQFAKQAGDPKALELVERILEEALRALREGDKETLEQLLLFVEVILMLLRAYQFAKQAGDPKALELVERILEEALRALREGDHRTLYRLLLFVEVILMLLRAYQFAKQAGDPKALELVERILEEALRALREGDHETLFRLLSLVFEILLRLREY

SEQ ID NO: 1249 - protein, 193 aa, synthetic construct
  REGION 1..193: note = Synthetic
SESIEELARLLERASREGDRETLERLYEVLHLIRLAELAMKLAKELGQPEYMESIQELFELAKQAFKEGDEETLRRLIEVVRLIILALLAMKLAKELGQPEYMESIQELFELAKQAFKEGDEETLRRLIEVVRLIILALLAMKLAKELGQPEYMESIQELFELAKQAFKEGDDELLQELLQLVLQIILRLLKM

SEQ ID NO: 1250 - protein, 222 aa, synthetic construct
  REGION 1..222: note = Synthetic
LRQLEELRRLRILVQLVRVLAELLGDPELFETAKRLLQLAIEVSENGDEEKLRQLMELLRLLYLVALVLYLALELGDPELFETAKRLLQLAIEVSENGDEEKLRQLMELLRLLYLVALVLKLAQELGDPELFETAKRLLQLAIEVSENGDEEKLQFLMELLRLLYLVALVLKLAQELGDPELFETAKRLLQLAIEVSENGDEEKLLELLLLLYHLYLVAQKL

SEQ ID NO: 1251 - protein, 222 aa, synthetic construct
  REGION 1..222: note = Synthetic
LRQERLLIELEYLVNRVRALARLLGDPELFETAKRLLQLAIEVSENGDEEKLRQLMELLRLLYLVALVLKLAQELGDPELFETAKRLLQLAIEVSENGDEEKLRQLMELLRLLYLVALVLKLAQELGDPELFETAKRLLQLAIEVSENGDEEKLRQLMELLRLLYLVALVLKLAQELGDPELFETAKRLLQLAIEVSENGDRRKLEELLLLLHRLFLKAREL

SEQ ID NO: 1252 - protein, 222 aa, synthetic construct
  REGION 1..222: note = Synthetic
DEREELLFQLYVLVLRVLRLARELGDPELFETAKRLLQLAIEVSENGDEEKLRQLMELLRLLYLVALVLKLAQELGDPELFETAKRLLQLAIEVSENGDEEKLRQLMELLRLLYLVALVLKLAQELGDPELFETAKRLLQLAIEVSENGDEEKLRQLMELLRLLYLVALVLKLAQELGDPELFETAKRLLQLAIEVSENGDEERLQQLLVLLRILYDKALKL

SEQ ID NO: 1253 - protein, 219 aa, synthetic construct
  REGION 1..219: note = Synthetic
DEMITRLFELVSLIRILARSAGDPEALKTAQEALERVIELERAGMTEELEQLFMILVLLYLVLRILILAKQAGDPEALKTAQEALERVIELFRAGMTEELEQLFMILVLLMLVLLILILAKEAGDPEALKTAQEALERVIELFRAGMTEELKKLFRILVLLMLVLLILLLAKEAGDPEALKTAQEALERVIELFRAGMTEELLELYKLLLHLLFRLRVS

SEQ ID NO: 1254 - protein, 211 aa, synthetic construct
  REGION 1..211: note = Synthetic
DELLLKIELIVHLLKALARFLGNEELLESAEEVLRRAQQAASDEEQLKRILTLARILYLVMLLLFLALLLGNEELLESAEEVLRRAQQAASDEEQLKRILTLARILLLVMLLLELAKKLGNEELLESAEEVLRRAQQAASDERQLQTILTLARILLLVMLLLELAKKLGNEELLESAEEVLRRAQQAASDYRQLLQIYALAEELYLEMEEL

SEQ ID NO: 1255 - protein, 276 aa, synthetic construct
  REGION 1..276: note = Synthetic
SEFEHYLFLADSLAYEVHLLAREIEEQGDLEAAKLLLIVARNLAELLVQLRESLKQGDEEYARLAEFLMYLASAAVYAALVFLLAKEIEKQGDLEAAKLLLIVARNLAELLVQLAESLKQGDEEYARLAEFLMYLASAAVYAALVFLLAKQIEEQGDLEAAKLLLIVARNLAELLVQLAESLKQGDEEYARLAKFLAYLASAAVYAALVFLLAKQIEEQGDLEAAKLLLIVARNLAELLVQLAESLKQGDEEYARLAKELYIEALKAVIDARFFLS

SEQ ID NO: 1256 - protein, 276 aa, synthetic construct
  REGION 1..276: note = Synthetic
DEFEHFLHLAQYLAQLVHELAKNIEEQGDLEAAKLLLIVARNLAELLVQLQESLRQGDEEYARLAEFLAYLASAAVYAALVFLLAKQIEEQGDLEAAKLLLIVARNLAELLVQLAESLKQGDEEYARLARFLMYLASAAVYAALVFLLAKQIEEQGDLEAAKLLLIVARNLAELLVQLAESLKQGDEEYARLAFFLMFLASAAVYAALVFLLAKQIEEQGDLEAAKLLLIVARNLAELLVQLAESLKQGDEEYARLAIRLYFEALYAVVIARIILS

SEQ ID NO: 1257 - protein, 249 aa, synthetic construct
  REGION 1..249: note = Synthetic
DERLETNVLLLEILSLAHRILRLASETGDPTIEELARQLREEVKRLIELTKAGDEEARKLMETIYWLARIVLIAALILILAQQTGDPTIEELARQLLEEVKRLIELTKAGDEEARKLMETIYWLARIVLIAALILILAQQTGDPTIEELARQLLEEVKRLIELTKAGDEEARKLMETIYDLARIVLIAALILILAQQTGDPTIEELARQLLEEVKRLIELTKAGDEEAKKLMKRIYAEALKVLLEARLS

SEQ ID NO: 1258 - protein, 249 aa, synthetic construct
  REGION 1..249: note = Synthetic
SKEEETKEWLLEIRIIAEQIELLAEQTGDPTIEELARQLLEEVKRLIELTKAGDEEARKLMETIYWLARIVLIAALILILAQQTGDPTIEELARQLLEEVKRLIELTKAGDEEARKLMETIYWLARIVLIAALILILAQQTGDPTIEELARQLLEEVKRLIELTKAGDEEARKLMETIYWLARIVLIAALILILAQQTGDPTIEELARQLLEEVKRLIELTKAGDEEARKLMLEIYSKAVHVFLQAEIS

SEQ ID NO: 1259 - protein, 249 aa, synthetic construct
  REGION 1..249: note = Synthetic
SEQERLEYIAQRAHNIILLIERLAREAGDPDARELARRLLENIKQILKHLEAGDEEVREQLELIYLAALAVLLIILIYIMAQKAGDPDARELARRLLENIKQILKHLEAGDEEVREQLELIYLAALAVLLIILIYIMAQKAGDPDARELARRLLENIKQILKHLEAGDEEVREQLELIYLAALAVLLIILIYIMAQKAGDPDARELARRLLENIKQILKHLEAGDEEVKEQLLEIYLLALRVLYRIRRY

SEQ ID NO: 1260 - protein, 277 aa, synthetic construct
  REGION 1..277: note = Synthetic
DEIEELINRVRHLIQLVEINAEFIKNEGNEEAARSVSELARLLLEIAKELIEQSKTGDEEAKQQLEILLLIAEVVLLIALVMILAIEIKLQGNEEAARSVSELARLLLEIAKELIEQSKTGDEEAKQQLEILLLIAEVVLLIALVMILAYRIKQQGNEEAARSVSELARLLLEIAKELIEQSKTGDEEAKHQLHILLIIAEVVLLIALVMILAYRIKQQGNEEAARSVSELARLLLEIAKELIEQSKTGDEEAERQLYELLILARRVLLFAEHMIRS

SEQ ID NO: 1261 - protein, 209 aa, synthetic construct
  REGION 1..209: note = Synthetic
SELERLLNHIIYLAVLIRLNATSEEQQQQARELMEKLLEAVEMGDPKKVQLLLLAAEIILLAIRIIRNATSEEQQQQARELMEKLLEAVEMGDPKKVQLLLLAAEIILLAIRIIRNATSEEQQQQARELMEKLLEAVEMGDPHKVYLLLLAAEIILLAIRIIRNATSEEQQQQARELMEKLLEAVEMGDPRKVLELLVRALLILHEIES

SEQ ID NO: 1262 - protein, 205 aa, synthetic construct
  REGION 1..205: note = Synthetic
DELEHLALEAEALAYQLESAGDEEFQEIAQQIKRELKEALRLGDEEKLRMVLLAVEAALLAWKLYRAGDEEFQEIAQQILRELKEALRLGDEEKLRMVLLAVEAALLAWKLYRAGDEEFQEIAQQILRELKEALRLGDEEKLRMVLLAVEAALLAWKLYRAGDEEFQEIAQQILRELKEALRLGDEKRLRHVLLLVYFALEEWKL

SEQ ID NO: 1263 - protein, 205 aa, synthetic construct
  REGION 1..205: note = Synthetic
DRLEKLALRAHFLAYLLHLSGDEEFQRIAREILESLREALQRGDEEKLRLVMLAVTAALLAFELYRSGDEEFQRIAREILESLREALQRGDEEKLRLVMLAVTAALLAFKLYQSGDEEFQRIAREILESLREALQRGDEHKLRLVMLAVTAALLAFKLYQSGDEEFQRIAREILESLREALQRGDFEKLLEVQNKVRLALQRFEH

SEQ ID NO: 1264 - protein, 205 aa, synthetic construct
  REGION 1..205: note = Synthetic
SRLEELAQRAQALAYELHLSGDEEFQRIAREILESLREALQRGDEEKLRLVMLAVTAALLALQLYKSGDEEFQRIAREILESLREALQRGDEEKLRLVMLAVTAALLAFKLYQSGDEEFQRIAREILESLREALQRGDERKLRLVMFAVTAALLAFKLYQSGDEEFQRIAREILESLREALQRGDLEKLIRVYIKVLEALLKSES

SEQ ID NO: 1265 - protein, 219 aa, synthetic construct
  REGION 1..219: note = Synthetic
DDERAEILYLVYLIRIMAKRLGQPELWESAQEILRLFEEAERAGDDELVKRILLFAQILYLVAKILKMAKELGQPELWESAQEILRLFEEAQRAGDDELVKRILLFAQILYLVAKILKMAKELGQPELWESAQEILRLFEEAQRAGDDELVKRILLFAQILYLVAKILKMAKELGQPELWESAQEILRLFEEAQRAGDDELVKEILLLALHLYYRARLL

SEQ ID NO: 1266 - protein, 158 aa, synthetic construct
  REGION 1..158: note = Synthetic
SELEYYVLFAELMRILVKLAGDEEQFRLVKELFERALRALQEGDEHTLYLLEFVLLALLMLITVKLAGDEEQFRLVKELFERALRALQEGDLRTLFLLYFVLLALEMLILVKRRGDEEQFRLVKELFERALRALQEGDLETLLRLSSDLFRLEYRILS

SEQ ID NO: 1267 - protein, 207 aa, synthetic construct
  REGION 1..207: note = Synthetic
SIRELQERIVREYFQALEEGDEEKLREMRLLAELVRTALEVYETARKLKKQGDYEIAELAERIVQQLLEASQEGDEEKLREMLLLAELVLTAAEVSETARKLKKQGDYEIAELAERIVQQLLEASQEGDEEKLREMLLLAELVLTAAEVSETARKLKKQGDYEIAELAERIVQQLLEASQEGDEKKLREMHHLAVHVLRRARLSEES

SEQ ID NO: 1268 - protein, 207 aa, synthetic construct
  REGION 1..207: note = Synthetic
DELRYEAKILLELALKLAQELGDEELIRLVKELIERLKEATDEEEIRLILLQVQALLLLIRALKLAQELGDEELIRLVKELIERLKEATDEEEIRLILLQVQALLLLILALKLAQELGDEELIRLVKELIERLKEATDEEEIELILLQVQALLLLILALKLAQELGDEELIRKVKELIERLKEATDFEEINRILVLVTQLLKRILRL

SEQ ID NO: 1269 - protein, 222 aa, synthetic construct
  REGION 1..222: note = Synthetic
SDLRRLLAQLRRLVILIQELARELGDEENLKTARELEERMQEASQRGDEEKIRLLTLLAQLVQLVLLILKLAKELGDEENLKTARELSERMQEASQRGDEEKIRLLTLLAQLVQLVLLILLLARELGDEENLKTARELSERMQEASQRGDEEKIRLLTILALLVQLVLLILHDARQLGDEENLKTARELSERMQEASQRGDEEKIRELTLIAIELQIRLEHS

SEQ ID NO: 1270 - protein, 222 aa, synthetic construct
  REGION 1..222: note = Synthetic
DRLERILEHAKAIAVQARLLASKAGQEEVRQEVQEILERLKQAVKEGDEEKIRLLLKLLEAILLAARAILLAKEAGQEEVSQEVQEILERLKQAVKEGDEEKIRLLLKLLEAILLAARAILLAKEAGQEEVSQEVQEILERLKQAVKEGDEEKIRLLLILLEAILLAARAILLAKEAGQEEVSQEVQEILERLKQAVKEGDEEKIIRLFLLLIYILLYAELS

SEQ ID NO: 1271 - protein, 219 aa, synthetic construct
  REGION 1..219: note = Synthetic
DSLEIHLRLLAEEAEHIARLLGNEEFLEIIKELFELMVRASRAGDDEKLKQIQLLIELVILALRAYELAQELGNEEFLEIIKELFELMVRASRAGDDKKLRFIRLLIELVILALLAYKLAQELGNEEFLEIIKELFELMVRASRAGDLRKLYHILLLIELVILALLAYKLAQELGNEEFLEIIKELFELMVRASRAGDEQKLIQIYLLIFQVYVELSHL

SEQ ID NO: 1272 - protein, 219 aa, synthetic construct
  REGION 1..219: note = Synthetic
SHLEKELRVLALYAELLARDLGNEEFLEIIKELFELMVRASRAGDDEKLKQIQLLIELVILALRAYFLAHELGNEEFLEIIKELFELMVRASRAGDDEKLKQIQLLIELVILALLAYRLAQELGNEEFLEIIKELFELMVRASRAGDDEKLLHIYLLILLVILALLAYKLAQELGNEEFLEIIKELFELMVRASRAGDEEKLKEILVLITRVILELYRL

SEQ ID NO: 1273 - protein, 219 aa, synthetic construct
  REGION 1..219: note = Synthetic
DELEIELHLLAQRAEFIARQLGNEEFLEIIKELFELMVRASRAGDDEKLKQIQLLIELVILALLAYHLAQELGNEEFLEIIKELFELMVRASRAGDDEKLKQIQLLIELVILALLAYKLAQELGNEEFLEIIKELFELMVRASRAGDDEKLKQIQLLIRLVILALLAYKLAQELGNEEFLEIIKELFELMVRASRAGDDEKLKEILELIQQVILRLELL

SEQ ID NO: 1274 - protein, 219 aa, synthetic construct
  REGION 1..219: note = Synthetic
DRLELELELLALEAETIARFLGNEEFLEIIKELFELMVRASRAGDDEKLKQIQLLIELVILALLAYFLAYLLGNEEFLEIIKELFELMVRASRAGDDEKLKQIQLLIELVILALLAYRLAHELGNEEFLEIIKELFELMVRASRAGDDEKLKQIHLLILLVILALLAYKLAQELGNEEFLEIIKELFELMVRASRAGDDEKLKHILRLISEVFTELHLL

SEQ ID NO: 1275 - protein, 229 aa, synthetic construct
  REGION 1..229: note = Synthetic
DRLEVKALELLLRAEVLARESQDDSELMQEIIRQLAEKVVRIIEAGDDEKLEQLILSILAIILLLQALILAKESQDDSELMQEIIRQLAEKVVRIIEAGDDEKLEQLILSILAIILLLQALILAKESQDDSELMQEIIRQLAEKVVRIIEAGDDEKLRQLIRSIEAIILLLQALILAKESQDDSELMQEIIRQLAEKVVRIIEAGDDRKLIRLLAHISRIIDFLRLLIS

SEQ ID NO: 1276 - protein, 207 aa, synthetic construct
  REGION 1..207: note = Synthetic
DETEVRILTLMYHVRLLAEHLGNPEVLESAQKILELFREARGEEQFELIFTQARILVLMALVYLLALRLGNPEVLESAQKILELFREARGEEQFELIFTQARILLLMALVYKLAKELGNPEVLESAQKILELFREARGEEQFREIFLQAVILLLMALVYKLAKELGNPEVLESAQKILELFREARGHEQFLEIAALAYRLLLIARSL

SEQ ID NO: 1277 - protein, 231 aa, synthetic construct
  REGION 1..231: note = Synthetic
LKEMHEAELLVNEVELLARHAGDEEALETAKQLSREIIEISQSGSEEARERLKELSEMIEALILVLLVLILAKRAGDEEALETAKQLSREIIEISQSGSEEARERLRKLQLMIEALILVLLVLILAKQAGDEEALETAKQLSREIIEISQSGSEEALERLRKLRLMIRALILVLLVLTLAKQAGDEEALETAKQLSREIIEISQSGSEEALRRLYELIVLIEELLDHLDQL

SEQ ID NO: 1278 - protein, 246 aa, synthetic construct
  REGION 1..246: note = Synthetic
DLRLDEVYIFIILALYIAEKLKRKDEEVAKTISEMARQLEERLEEASKSGDEEEIRLVWLLAQVLFFIASAFLIAQRLKRKDEEVAKTISEMARQLLERLEEASKSGDEEEIRLVWLLAQVLWFIAAAFHIALELKRKDEEVAKTISEMARQLLERLEEASKSGDEEEIHLVWLLAQVLFYIAVAFLIAQELKQKDEEVAKTISEMARQLLERLEEASKSGDEEEIRLVWELALRLLAEALIFLLS

SEQ ID NO: 1279 - protein, 225 aa, synthetic construct
  REGION 1..225: note = Synthetic
SELEELLLEAHHLMLLVELIARDTGDPEILEIARELLELLKQVSKSGDEEEIRLIVLLAQAAYFMAKVYLIAKRTGDPEILEIARELLELLKQVSKSGDEEEIRLIVLLAQAAWFMAEVYLIAKQTGDPEILEIARELLELLKQVSKSGDEHEIRLIVLLAQAAWFMAEVYLIAKQTGDPEILEIARELLELLKQVSKSGDEEEITEIVILAIQAFFQARNVLRR

SEQ ID NO: 1280 - protein, 225 aa, synthetic construct
  REGION 1..225: note = Synthetic
DRLEELLLEAERFMFDVELIARITGDPEILEIARELLELLKQVSKSGDEEEIRLIVLLAQAAYFMAEVYYIAKKTGDPEILEIARELLELLKQVSKSGDEEEIRLIVLLAQAAWFMAEVYLIAKQTGDPEILEIARELLELLKQVSKSGDEEEIRLIVLLAQAAWFMAEVYLIAKQTGDPEILEIARELLELLKQVSKSGDEEEIRRILQLAIRAFTEARLRLFS

SEQ ID NO: 1281 - protein, 224 aa, synthetic construct
  REGION 1..224: note = Synthetic
TELRELLLRAEIFIIRAFHLAKEAGQPEFLEMAQRLLQRLQEATESGDEEEIKLVVLLAQAIYFIVTAYRLAKEAGQPEFLEMAQRLLQRLQEATESGDEEEIKLVVLLAQAIYFIVTAYRLAKEAGQPEFLEMAQRLLQRLQEATESGDEEEIKLVVLLAQAIYFIVTAYRLAKEAGQPEFLEMAQRLLQRLQEATESGDEREILRVVLLALEIYIRVETHRS

SEQ ID NO: 1282 - protein, 224 aa, synthetic construct
  REGION 1..224: note = Synthetic
DELEQLLVEAETLIFHAELLARLAGQPEFLEMAQRLLQRLQEATESGDEEEIKLVVLLAQAIVFIVQAYLLARQAGQPEFLEMAQRLLQRLQEATESGDEEEIKLVVLLAQAIYFIVTAYLLAKEAGQPEFLEMAQRLLQRLQEATESGDEEEIKLVVLLAEAIYFIVTAYRLAKEAGQPEFLEMAQRLLQRLQEATESGDKREIIEVVVEALRIYIEVRNYLS

SEQ ID NO: 1283 - protein, 211 aa, synthetic construct
  REGION 1..211: note = Synthetic
DTLELKLRALAYEVRELAQKAGNPELIELARKIEEIVEQAGDDEEKLRLAYLQVLLAILAILVYLLAQKAGNPELIELARKILEIVEQAGDDEEKLRLAYLQVLLAILAILVYLLAQKAGNPELIELARKILEIVEQAGDDEEKLRLAYLQVLLAILAILVYLLAQKAGNPELIELARKILEIVEQAGDDERKLLRAQAEVRYAIKEILKY

SEQ ID NO: 1284 - protein, 225 aa, synthetic construct
  REGION 1..225: note = Synthetic
DEQELQVQRAHVLIREAQQYAKALGDPENLESLRELLQLIVEVTREGDQEKLEQLLQVALAMLLILKALQYAKALGDPENLESLRELLQLIVEVTREGDQEKLEQLLQVALAMLLILKALQYAKALGDPENLESLRELLQLIVEVTREGDQEKLEQLLQVARAMLLILKALQYAKALGDPENLESLRELLQLIVEVTREGDQEKLTELLVLAYRFLLRLEELQRS

SEQ ID NO: 1285 - protein, 224 aa, synthetic construct
  REGION 1..224: note = Synthetic
DQLEILALQLRSLLLQAKILAEQAGQPEFSEVVRELLQKALQVLREGDFEKMELLVLAARLVLLLLKALFYAKQAGQPEFSEVVRELLQKALQVLREGDFEKMELLLLAARLVLLLLKALFYAKQAGQPEFSEVVRELLQKALQVLREGDFEKMELLLLAARLVLLLLKALFYAKQAGQPEFSEVVRELLQKALQVLREGDHKKMYELLTQALIVLRELKALFY

SEQ ID NO: 1286 - protein, 224 aa, synthetic construct
  REGION 1..224: note = Synthetic
DELERLANKLFSLLFEALYLALLAGQPEFYEVVRELLQKALQVLREGDFEKMELLLLAARLVLLLLKALFYAKQAGQPEFSEVVRELLQKALQVLREGDFEKMELLLLAARLVLLLLKALFYAKQAGQPEFSEVVRELLQKALQVLREGDFEKMELLLLAARLVLLLLKALFYAKQAGQPEFSEVVRELLQKALQVLREGDFEKMRELERLAREVLVQLQLLFS

SEQ ID NO: 1287 - protein, 211 aa, synthetic construct
  REGION 1..211: note = Synthetic
DELELEIQLIVLLIEHFAKRLGDPRLKESAEEVLELVQRAADDEEELQLIFLLAQILLLVARILFLALQLGDPRLKESAEEVLELVQRAADDEEELQLIFLLAQILLLVALILQMAKKLGDPRLKESAEEVLELVQRAADDEEELRLIFLLARILLLVALILEMAKKLGDPRLKESAEEVLELVQRAADDKEELEKIYLLAVQLLERALEL

SEQ ID NO: 1288 - protein, 223 aa, synthetic construct
  REGION 1..223: note = Synthetic
LDHLILEAESLITEILILARKAGDPEMEEIARQLKEDLEEAKRSGDEETIRLIYLIVSAAFLIVQILYLAKQAGDPEMKEIARQLKEDLEEAKRSGDEETIRLIYLIVSAAFLIVQILYLAKQAGDPEMKEIARQLKEDLEEAKRSGDEETIRLIYLIVSAAFLIVQILYLAKQAGDPEMKEIARQLKEDLEEAKRSGDEETIRRILQRVKRAFAHVEYLFNS

SEQ ID NO: 1289 - protein, 223 aa, synthetic construct
  REGION 1..223: note = Synthetic
LIELIKEALRLINLIKVLAHIAGDPEMKEIARQLKEDLEEAKRSGDEETIRLIYLIVSAAFLIVQILYLAKEAGDPEMKEIARQLKEDLEEAKRSGDEETIRLIYLIVSAAFLIVQILYLAKQAGDPEMKEIARQLKEDLEEAKRSGDEETIRLIYLIVSAAFLIVQILYLAKQAGDPEMKEIARQLKEDLEEAKRSGDERTIRRILFKVREAHLRVEYLYES

SEQ ID NO: 1290 - protein, 265 aa, synthetic construct
  REGION 1..265: note = Synthetic
DTTERALHLVYQIEAIALLIEKQGDKEAAQKMKEIFEQARELIQEAEEIYRKTGSYEWLEFVFTLIRALYLVVQILLIATRIEKQGDKEAAQKMKEIFEQARELIQEAEEIYRKTGSYEWLEFVFTLIRALYLVVQILEIATRIEKQGDKEAAQKMKEIFEQARELIQEAEEIYRKTGSYEWLEFVFTLIRALYLVVQILEIATRIEKQGDKEAAQKMKEIFEQARELIQEAEEIYRKTGSYEWLKHVFLIIQRLFNEVKLLEQS

SEQ ID NO: 1291 - protein, 225 aa, synthetic construct
  REGION 1..225: note = Synthetic
SRKEKLLIEAEILIYRIELIAKYIGDPEMQETAEEAKELVREAKETGDEKEIRKVFLLVQALFLIIQILLQAKETGDPEMQETAEEAKELVREAKETGDEKEIRKVFLLVQALFLIIQILLQAKQTGDPEMQETAEEAKELVREAKETGDEKEIRKVFLLVQALFLIIQILLQAKQTGDPEMQETAEEAKELVREAKETGDHREILRVYVLVLHLFYHIELLLEH

SEQ ID NO: 1292 - protein, 222 aa, synthetic construct
  REGION 1..222: note = Synthetic
DEKEHLLNEIRLILLEMRILAKRAGDPELIEIIQLILEKILEAIRAGDEEKIRKVFLLAQIALLLIKMVILAQEAGDPELIEIIQLILEKILEAIRAGDEEKIRKVFLLAQIALLLIKMVILAQEAGDPELIEIIQLILEKILEAIRAGDEEKIRKVFLLAQIALLLIKMVILAQEAGDPELIEIIQLILEKILEAIRAGDEEKIRQVFYLAQLALLFIELH

SEQ ID NO: 1293 - protein, 222 aa, synthetic construct
  REGION 1..222: note = Synthetic
DEKEELEIRIRSLLEEMHLLARRAGDPELIEIIQLILEKILEAIRAGDEEKIRKVFLLAQIALLLIKMVILAQEAGDPELIEIIQLILEKILEAIRAGDEEKIRKVFLLAQIALLLIKMVILAQEAGDPELIEIIQLILEKILEAIRAGDEEKIRKVFLLAQIALLLIKMVILAQEAGDPELIEIIQLILEKILEAIRAGDERKIQHVYVLAIHALLYIKIS

SEQ ID NO: 1294 - protein, 222 aa, synthetic construct
  REGION 1..222: note = Synthetic
SRKERLEREIRIILHEMRIRAEEAGDPELIEIIQLILEKILEAIRAGDEEKIRKVFLLAQIALLLIRMVILAQEAGDPELIEIIQLILEKILEAIRAGDEEKIRKVFLLAQIALLLIKMVILAQEAGDPELIEIIQLILEKILEAIRAGDEEKIRKVFLLAQIALLLIKMVILAQEAGDPELIEIIQLILEKILEAIRAGDERKIHEVYVLAVRALLFIEQV

SEQ ID NO: 1295 - protein, 250 aa, synthetic construct
  REGION 1..250: note = Synthetic
DELETRVRILAAEAILLVLEALKRSTDPETQESLRQMLEEIIEFAKKAAYADEEEVRQALQALKVIILALIAILLVQEALKRSTDPETQESLRQMLEEIIEFAKKAAYADEEEVRQALQALKVIILALIAILLVQEALKRSTDPETQESLRQMLEEIIEFAKKAAYADEEEVRQALLALKVIILALIAILLVQEALKRSTDPETQESLRQMLEEIIEFAKKAAYADFEEVAHALAALYEILLQLEHILRS

SEQ ID NO: 1296 - protein, 222 aa, synthetic construct
  REGION 1..222: note = Synthetic
DEERILLLQAEAIIIELEHIARRAGSPELLQLVKEILEEFQRALESGDKEEIEKVLMLVKAALIIARLFLIAKQAGSPELLQLVKEILEEFQRALESGDKEEIEKVLMLVKAALIIARLFLIAKQAGSPELLQLVKEILEEFQRALESGDKEEIEKVLMLVKAALIIARLFLIAKQAGSPELLQLVKEILEEFQRALESGDKKLIHQVLVQVLYALLEAEFS

SEQ ID NO: 1297 - protein, 222 aa, synthetic construct
  REGION 1..222: note = Synthetic
DEKEKMLLHAEYIIRELEEIAREAGSPELLQLVKEILEEFQRALESGDKEEIEKVLMLVKAALIIARLFLIAKQAGSPELLQLVKEILEEFQRALESGDKEEIEKVLMLVKAALIIARLFLIAKQAGSPELLQLVKEILEEFQRALESGDKEEIEKVLMLVKAALIIARLFLIAKQAGSPELLQLVKEILEEFQRALESGDKEEIRRVLYLVLEALLRAELS

SEQ ID NO: 1298 - protein, 210 aa, synthetic construct
  REGION 1..210: note = Synthetic
DELELRIEILILQALILARRAGNPEYEETVRELLKQLKKAKSEEELQRILTFARILYLIVRAFLLAKEAGNPEYLETVRELLKQLKKAKSEEELQRILTFARILYLIVRAFLLAKEAGNPEYLETVRELLKQLKKAKSEEELQRILTFARILYLIVRAFLLAKEAGNPEYLETVRELLKQLKKAKSEEELKRILLRAQELYTQVRLFLQS

SEQ ID NO: 1299 - protein, 222 aa, synthetic construct
  REGION 1..222: note = Synthetic
SEEEFMLLEAESTIHELELIARLAGSPELLQLVKEILEEFQRALESGDKEEIEKVLMLVKAALIIARLFFIAQEAGSPELLQLVKEILEEFQRALESGDKEEIEKVLMLVKAALIIARLFLIAKQAGSPELLQLVKEILEEFQRALESGDKHEIRKVLHLVKAALIIARLFLIAKQAGSPELLQLVKEILEEFQRALESGDLHEILRVLNIVLRALLFAEEF

SEQ ID NO: 1300 - protein, 222 aa, synthetic construct
  REGION 1..222: note = Synthetic
DEKEEMLKEAHLIIRTLETLARLAGSPELLQLVKEILEEFQRALESGDKEEIEKVLMLVKAALIIALLFFIAKQAGSPELLQLVKEILEEFQRALESGDKEEIEKVLMLVKAALIIARLFYIAKKAGSPELLQLVKEILEEFQRALESGDKREIYKVLLLVIAALLIARLFLIAKQAGSPELLQLVKEILEEFQRALESGDVEEIIHVVALVLEALLHAETS

SEQ ID NO: 1301 - protein, 222 aa, synthetic construct
  REGION 1..222: note = Synthetic
SEEEHLLLQAEVIILLLETLARHAGSPELLQLVKEILEEFQRALESGDKEEIEKVLMLVKAALIIARLFIIAKQAGSPELLQLVKEILEEFQRALESGDKEEIEKVLMLVKAALIIARLFLIAKQAGSPELLQLVKEILEEFQRALESGDKKEIKKVLYLVKAALIIARLFLIAKQAGSPELLQLVKEILEEFQRALESGDFREILRVLAEVLTALEIAREF

SEQ ID NO: 1302 - protein, 202 aa, synthetic construct
  REGION 1..202: note = Synthetic
DELEILANTARTILELIRRHADPEFKEMLQLVLELIKEALLNNDLELVQLAWFAALALLILLQIRRHADPEFKEMLQLVLELIKEALLNNDLQLVRLAWFAALALLILLKIRRHADPEFKEMLQLVLELIKEALLNNDLQLVILAWIAALALLILLKIRRHADPEFKEMLQLVLELIKEALLNNDLELVLRALAHALVLLES

SEQ ID NO: 1303 - protein, 251 aa, synthetic construct
  REGION 1..251: note = Synthetic
SEELRRLVLEIERILLEVEKLMKELGSPEARETAEQVYQTFQEAIESLQEGDEEKAKRSLELALIVAKIAYLLLLVIKLMRELGSPEARETAEQVYQTFQEAIESLQEGDEEKAKRSLELALIVAKIAYLLLLVIKLMRELGSPEARETAEQVYQTFQEAIESLQEGDEEKAKRSLELALIVAKIAYLLLLVIKLMRELGSPEARETAEQVYQFFQEAIESLQEGDEEKAHRRLLEALHFAEYAFYYLRLL

SEQ ID NO: 1304 - protein, 251 aa, synthetic construct
  REGION 1..251: note = Synthetic
SEELRQLVLEIEIILLRVEQLMKELGSPEARETAEQVYQTFQEAIESLQEGDEEKAKRSLELALIVAKIAYLLLLVIKLMRELGSPEARETAEQVYQTFQEAIESLQEGDEEKAKRSLELALIVAKIAYLLLLVIKLMRELGSPEARETAEQVYQTFQEAIESLQEGDEEKAKRSLELALIVAKIAYLLLLVIKLMRELGSPEARETAEQVYQTFQEAIESLQEGDEEKAEEDLIRALNFARLAYRHLRNL

SEQ ID NO: 1305 - protein, 251 aa, synthetic construct
  REGION 1..251: note = Synthetic
SKELEEIVNRIEELLSIVRTLMRILGSPEARETAEQVYQTFQEAIESLQEGDEEKAKRSLELALIVAKIATLLLRVIHLMLLLGSPEARETAEQVYQTFQEAIESLQEGDEEKAKRSLELALIVAKIAYLLLLVIQLMRELGSPEARETAEQVYQTFQEAIESLQEGDEEKALRSLYLALLVAKIAYLLLLVIKLMRELGSPEARETAEQVYQTFQEAIESLQEGDHEKALRILLEALAFALFAFFLLRLL

SEQ ID NO: 1306 - protein, 216 aa, synthetic construct
  REGION 1..216: note = Synthetic
DEEEIFLQQMEVSLSRLERTARQLKQLGNKEAAETLRRTVEEILELIKRFQNATTEEESQKAKERLQELLELVRMLLSLAELFRTAQQLKQLGNKEAAETLRRTVEEILELIKRFQNATTEEESQKAKERLQELLELVRMLLSLAELFRTAQQLKQLGNKEAAETLRRTVEEILELIKRFQNATTEEESRKARERLLRLLIEVEILLRRAEEFRTS

SEQ ID NO: 1307 - protein, 247 aa, synthetic construct
  REGION 1..247: note = Synthetic
DEELRNKARELLIRLQLLLQQARTPELREAAQIALELAIELMRIVLNGSEEEIKQAVEKLELLVKALQLLFTLYELLRQARTPELREAAQIALELAIELMRIVLNGSEEEIKQAVEKLELLVKALQLLFTLYELLRQARTPELREAAQIALELAIELMRIVLNGSEEEIKQAVEKLELLVKALQLLFTLYELLRQARTPELREAAQIALELAIELMRIVLNGSEREIRRAVLQLEALVIHLKALFES

SEQ ID NO: 1308 - protein, 207 aa, synthetic construct
  REGION 1..207: note = Synthetic
DELRVRVESILRLVEILARQAGDPEAVEAVKELLQELKRATDAEEIRSLLLFARVLYLLLRVLEMARQAGDPEAVEAVKELLQELKRATDAEEIRSLLLFARVLLLLLQVLEMARQAGDPEAVEAVKELLQELKRATDAEEIRSLLLFARVLLLLLQVLEMARQAGDPEAVEAVKELLQELKRATDAQEIFELLLFALHLLHKLEEL

SEQ ID NO: 1309 - protein, 225 aa, synthetic construct
  REGION 1..225: note = Synthetic
SLVEKWAIKASQLIAQLYILAEFLGDPEFLQIARELERKLRQALERGSIEDLLVIWWAVSAVLLIMKLYILAKELGDPEFLQIARELLRKLYQALERGSIEDLLVIWWAVSAVLLIMKLYILAKELGDPEFLQIARELLRKLYQALERGSIEDLLVIWLAVSAVLLIMKLYILAKELGDPEFLQIARELLRKLYQALERGSREDLLKILHEVREVLSRMELFILL

SEQ ID NO: 1310 - protein, 207 aa, synthetic construct
  REGION 1..207: note = Synthetic
DELRLKVEQILARVETLARQAGDPEAVEAVKELQQELKRATDAEEIRSLLLFARVLLLLLRVLHMARKAGDPEAVEAVKELLQELKRATDAEEIRSLLLFARVLLLLLQVLEMARQAGDPEAVEAVKELLQELKRATDAEEIRSLLLFARVLLLLLQVLEMARQAGDPEAVEAVKELLQELKRATDAEEIRELLIFALRLLVELEHS

SEQ ID NO: 1311 - protein, 207 aa, synthetic construct
  REGION 1..207: note = Synthetic
DLERYRVLIILLTVENIARLAGDPEAVEAVKELLQELKRATDAEEIRSLLLFARVLYLLLLVLFLARHAGDPEAVEAVKELLQELKRATDAEEIRSLLLFARVLLLLLQVLLMARQAGDPEAVEAVKELLQELKRATDAEEIRSLLLFATVLLLLLQVLEMARQAGDPEAVEAVKELLQELKRATDAQEILELLLFALHLLLELEQL

SEQ ID NO: 1312 - protein, 266 aa, synthetic construct
  REGION 1..266: note = Synthetic
SDQETETLHLMIEVESLIRLVELYARRAGDEEALEAARQLLERLQEALERAASSDEEDFKRAEQIIRTLLLMVKVLLYILLVLLHAKEAGDEEALEAARQLLERLQEALERAASSDEEDFKRAEQIIRTLLLMVKVLLYILLVLKHAKEAGDEEALEAARQLLERLQEALERAASSDEEDFKRAEQIIRTLLLMVKVLLYILLVLKHAKEAGDEEALEAARQLLERLQEALERAASSDEEDFKEAIRIIIRLLSLVIQLLLLLRTS

SEQ ID NO: 1313 - protein, 266 aa, synthetic construct
  REGION 1..266: note = Synthetic
DEQELETRTLMERVKQLIERVELLARHAGDEEALEAARQLLERLQEALERAASSDEEDFKRAEQIIRTLLLMVKVLLYILLVLKHAKEAGDEEALEAARQLLERLQEALERAASSDEEDFKRAEQIIRTLLLMVKVLLYILLVLKHAKEAGDEEALEAARQLLERLQEALERAASSDEEDFKRAEQIIRTLLLMVKVLLYILLVLKHAKEAGDEEALEAARQLLERLQEALERAASSDEEDFKRALEIIAELLAQVLSLLLRLRLL

SEQ ID NO: 1314 - protein, 266 aa, synthetic construct
  REGION 1..266: note = Synthetic
SKQEIETTELMIRVRYLIQLVELLARHAGDEEALEAARQLLERLQEALERAASSDEEDFKRAEQIIRTLLLMVKVLYYILLVLLHAKEAGDEEALEAARQLLERLQEALERAASSDEEDFKRAEQIIRTLLLMVKVLLYILLVLKHAKEAGDEEALEAARQLLERLQEALERAASSDEEDFERAREIIETLLLMVKVLLYILLVLKHAKEAGDEEALEAARQLLERLQEALERAASSDEEDFRRAIEIILRLLVLVRLLLRHLLQL

SEQ ID NO: 1315 - protein, 207 aa, synthetic construct
  REGION 1..207: note = Synthetic
SELEAKVESLLKRVLIQAKRLGDEEIIEVARELLQRLKEATDAEQIQTLLLFARVALLLALVLIQAKRLGDEEIIEVARELLQRLKEATDAEQIQTLLLFARVALLLALVLIQAKRLGDEEIIEVARELLQRLKEATDAEQIQTLLLFARVALLLALVLIQAKRLGDEEIIEVARELLQRLKEATDHRQIRRLLNRAREALVEAEES

SEQ ID NO: 1316 - protein, 207 aa, synthetic construct
  REGION 1..207: note = Synthetic
DELELEVHLILYVVLELARRLGDEEIIEVARELLQRLKEATDAEQIQTLLLFARVAELLARVLILAKRLGDEEIIEVARELLQRLKEATDAEQIQTLLLFARVALLLALVLIQAKRLGDEEIIEVARELLQRLKEATDRRQIYELLLFARVALLLALVLIQAKRLGDEEIIEVARELLQRLKEATDYRQILQLLALAEEARYEAEHL

SEQ ID NO: 1317 - protein, 221 aa, synthetic construct
  REGION 1..221: note = Synthetic
DHLEVLAEKVHHLALVLYEHAKRNGDEKMMELAQRALELVIQLLEEGDMEQVRLVYLALLVALLASELYFLAEENGDEKMMELAQRALELVIQLLEEGDMEQVRLVYLALLVALLALELYQLAKQNGDEKMMELAQRALELVIQLLEEGDMRQVELVYLALLVAILASELYELAKQNGDEKMMELAQRALELVIQLLEEGDYERVVEVFLLLLRAHHRSRS

SEQ ID NO: 1318 - protein, 261 aa, synthetic construct
  REGION 1..261: note = Synthetic
SEEENRIFEIAFQILQLVRELEKLAKQEGDPRMVELAQKIKEEVLRLLETVKEDKDHREEALENLQILLIAIQIAILVTELLRLAKQEGDPRMVELAQKILEEVLRLLETVKEDKDHREEALENLQILLIAIQIAILVTELLRLAKQEGDPRMVELAQKILEEVLRLLETVKEDKDHREEALENLQILLIAIQIAILVTELLRLAKQEGDPRMVEIAQRILEEVLRLLETVKEDKDHRERALRNLHILLTIIRAAILRTEL

SEQ ID NO: 1319 - protein, 222 aa, synthetic construct
  REGION 1..222: note = Synthetic
LKILHLAEQIRVRARFLHDQARLAGNPEILELAREVLKLVIELTQRNDFETLKILLLAIEIAIMATELYELAKQAGNPEILELAREVLKLVIELTQRNDFETLKILLLAIEIAIMATELYRLAKQAGNPEILELAREVLKLVIELTQRNDFETLKILLLAIEIAIHATELYRLAKQAGNPEILELAREVLKLVIELTQRNDHVELLQLLSLIVQALYETYRY

SEQ ID NO: 1320 - protein, 225 aa, synthetic construct
  REGION 1..225: note = Synthetic
SEVEHWAIRAEFLIQLLEVLAKQLGDPEFLQIARELLRKLYQALERGSIEDLLVIWWAVSAVLLIMKLYILAKELGDPEFLQIARELLRKLYQALERGSIEDLLVIWWAVSAVLLIMKLYILAKELGDPEFLQIARELLRKLYQALERGSIEDLLVIWFAVSAVLLIMKLYILAKELGDPEFLQIARELLRKLYQALERGSRRDLQQIYLEVLHELLQMEIFIRS

SEQ ID NO: 1321 - protein, 222 aa, synthetic construct
  REGION 1..222: note = Synthetic
SKIEELAREIRLLAQLLHLLARRAGNPEILELAREVLKLVIELTQRNDFETLKILLLAIEIAIMATELYRLAKQAGNPEILELAREVLKLVIELTQRNDFETLKILLLAIEIAIMATELYRLAKQAGNPEILELAREVLKLVIELTQRNDFETLKILLLAIEIAILATELYRLAKQAGNPEILELAREVLKLVIELTQRNDFETLEHLKYLILEALAQTYRH

SEQ ID NO: 1322 - protein, 222 aa, synthetic construct
  REGION 1..222: note = Synthetic
LKILLLAEEIRLLARVLHVLAEIAGNPEILELAREVLKLVIELTQRNDFETLKILLLAIEIALMATELYRLAKQAGNPEILELAREVLKLVIELTQRNDFETLKILLLAIEIAIMATELYRLAKQAGNPEILELAREVLKLVIELTQRNDFETLKILLLAIEIAILATELYRLAKQAGNPEILELAREVLKLVIELTQRNDFETLRHLRSNILRALSETHRH

SEQ ID NO: 1323 - protein, 264 aa, synthetic construct
  REGION 1..264: note = Synthetic
SLEFEVTEFVIRILQLAHEVERLAKELGDPKAVEAAQEILQDALELLRLVQSGDEETLKRALELLEVLYMVLRIISLAIEVERLAKELGDPKAVEAAQEILQDALELLRLVQSGDEETLKRALELLEVLYMVLRIISLAIEVERLAKELGDPKAVEAAQEILQDALELLRLVQSGDEETLKRALELLEVLYMVLRIISLAIEVERLAKELGDPKAVEAAQEILQDALELLRLVQSGDEETLRRAKHLLRRLLFELEEISEKIEQ

SEQ ID NO: 1324 - protein, 264 aa, synthetic construct
  REGION 1..264: note = Synthetic
DEEERVKYMVIRILALAYAVEYLAHLLGDPKAVEAAQEIYQDALELLRLVQSGDEETLKRALELLEVLYMVLRIIYLAILVEILAHILGDPKAVEAAQEILQDALELLRLVQSGDEETLKRALELLEVLYMVLRIISLAIEVEYLAKELGDPKAVEAAQEILQDALELLRLVQSGDRQTLLKALLLLYVLYLVLRIISLAIEVERLAKELGDPKAVEAAQEILQDALELLRLVQSGDDETLKRALERLHQLYLELLLISLEILS

SEQ ID NO: 1325 - protein, 264 aa, synthetic construct
  REGION 1..264: note = Synthetic
DELEEVEQMVREIFILAEQVEQLAKRLGDPKAVEAAQEILQDALELLRLVQSGDEETLKRALELLEVLYMVLRIISLAIEVERLAKELGDPKAVEAAQEILQDALELLRLVQSGDEETLKRALELLEVLYMVLRIISLAIEVERLAKELGDPKAVEAAQEILQDALELLRLVQSGDEETLKRALLLLEVLYMVLRIISLAIEVERLAKELGDPKAVEAAQEILQDALELLRLVQSGDRETLERALKRLYRLLTELELISRHIES

SEQ ID NO: 1326 - protein, 265 aa, synthetic construct
  REGION 1..265: note = Synthetic
DEKELHVLEIVLRIEVLVRQLEKLAQQEGDPRLLEAAKRALESALEMLERVQSGDEETFEKAQKQLEVLLTVLLILILVTELLRLAQQEGDPRLLEAAKRALESALEMLERVQSGDEETFEKAQKQLEVLLTVLLILILVTELLRLAQQEGDPRLLEAAKRALESALEMLERVQSGDEETFEKAQKQLEVLLTVLLILILVTELLRLAQQEGDPRLLEAAKRALESALEMLERVQSGDEETFKEAKSILRRLLFDLEILIEDTES

SEQ ID NO: 1327 - protein, 265 aa, synthetic construct
  REGION 1..265: note = Synthetic
DEKEEEVLRLVYEILVLVRKLLKLAQQEGDPRLLEAAKRALESALEMEERVESGDEETFEKAQKQLEVLLTVLLILILVTELLRLAQQEGDPRLLEAAKRALESALEMLERVQSGDEETFEKAQKQLEVLLTVLLILILVTELLRLAQQEGDPRLLEAAKRALESALEMLERVQSGDEETFEKAQKQLEVLLTVLLILILVTELLRLAQQEGDPRLLEAAKRALESALEMLERVQSGDEETFREALEILLQLLYHLRVLIRSTES

SEQ ID NO: 1328 - protein, 201 aa, synthetic construct
  REGION 1..201: note = Synthetic
DEVEIILQLAETLLRFIEILARKLGDPELEELARILLEQLLRMIQTIENGSEEEIRQAIEQAKVIFLLVQAVFLLARILELAKKLGDPELEELARILLEQLLRMIQTIENGSEEEIRQAIEQAEVIFRLVLAVYLLALILELAKKLGDPELEELARILLEQLLRMIQTIENGSEEEIRQAIEQANEILVRVLQVYLRALDL

SEQ ID NO: 1329 - protein, 201 aa, synthetic construct
  REGION 1..201: note = Synthetic
SDLEALLKIAVDLLRNILYIARENGDPELEELARILLEQLLRMIQTIENGSEEEIKEAEKQAYIIFLLVLAVVALALILSLAKRLGDPELEELARILLEQLLRMIQTIENGSEEERREALRLAVVIFVLVLAVFFLALILYLAKILGDPELEELARILLEQLLRMIQTIENGSEEEIRQAEEQAFRIFTDVLRVAAEAFHS

SEQ ID NO: 1330 - protein, 202 aa, synthetic construct
  REGION 1..202: note = Synthetic
LEELRRILFEQLYKLLHTVKNGSEEEIRQAEEQLEVIFLLIIAVYLLALILELAKKLGDPELEELARILLEQLLRMIQTIENGSEEEIRQAIEQAKVIFLLVQAVYLLALILELAKKLGDPELEELARILLEQLLRMIQTIENGSEEEIRQAIEQAKRIYILVEIVYALALALEYAKKEGDPELEKNARLLLEHLLRHIQES

SEQ ID NO: 1331 - protein, 225 aa, synthetic construct
  REGION 1..225: note = Synthetic
DEVYEIALEATVLITRLYFLARILGDPEFLQIARELHRKLYQALERGSIEDLLVIWWAVSAVLLIMKLYRLAKELGDPEFLQIARELLRKLYQALERGSIEDLLVIWWAVSAVLLIMKLYILAKELGDPEFLQIARELLRKLYQALERGSIEDLLVIWWAVSAVLLIMKLYILAKELGDPEFLQIARELLRKLYQALERGSIRDLREIFFEVLLELIRMEQFIQS

SEQ ID NO: 1332 - protein, 202 aa, synthetic construct
  REGION 1..202: note = Synthetic
DEELKVQQLALRIKVLARYLGQEEFFELAERMERLVQSGDEEEIKQVYEILLVALLALLILLLAKKLGQEEFFELAERMLRLVQSGDEEEIKQVYEILLVALLALLILELAKRLGQEEFFELAERMLRLVQSGDEEEIKQVYLILLVALLALLILELAKRLGQEEFFELAERMLRLVQSGDEEEIKEVLSILSEALTRLELL

SEQ ID NO: 1333 - protein, 219 aa, synthetic construct
  REGION 1..219: note = Synthetic
DEQLVRALSILYEAELLARLLGNEEFMEIVRRLLKELIQATQRGDEEKVRSLLQMALAVLILLRAYNLAKQLGNEEFMEIVRRLLKELIQATQRGDEEKVRSLLQMALAVLILLEAYRLAKELGNEEFMEIVRRLLKELIQATQRGDEEKVRSLLLMALAVLILLEAYRLAKELGNEEFMEIVRRLLKELIQATQRGDEEKVRELLRLAFEVLLRLRHS

SEQ ID NO: 1334 - protein, 222 aa, synthetic construct
  REGION 1..222: note = Synthetic
DETERTIQRAHILALEIELLARYLGDPELHEIVQEILRLLKEMLQEGDEERIRTLYTIVSAVLLAARIQFLAKLLGDPELHEIVQEILRLLKEMVQEGDEERIRTLYTIVSAVLLAAKIQRLAKELGDPELHEIVQEILRLLKEMVQEGDEERIRTLYTIVSAVLLAAKIQKLAKELGDPELHEIVQEILRLLKEMVQEGDEERIRKLYEFVIKVLLRAELQ

SEQ ID NO: 1335 - protein, 224 aa, synthetic construct
  REGION 1..224: note = Synthetic
DEEEYIMIEAKILAKEVLRLAKEMGDEELSEAAKRLIQELIRLLQEGDKEKIEQVYTMVSALLLAAEVLRLAKEMGDEELSEAAKRLIQELIRLLQEGDKEKIEQVYTMVSALLLAAEVLRLAKEMGDEELSEAAKRLIQELIRLLQEGDKEKIEQVYTMVSALLLAAEVLRLAKEMGDEELSEAAKRLIQELIRLLQEGDKRKIERVFIEVLQLLLEAEFLRS

SEQ ID NO: 1336 - protein, 224 aa, synthetic construct
  REGION 1..224: note = Synthetic
DEEEYLMNEAFAIAVTVELLARLMGDEELSEAAKRLIQELIRLLQEGDKEKIEQVYTMVSALLLAAKVLFLAKLMGDEELSEAAKRLIQELIRLLQEGDKEKIEQVYTMVSALLLAAEVLRLAKEMGDEELSEAAKRLIQELIRLLQEGDRHKIFLVFLMVEALLIAAEVLRLAKEMGDEELSEAAKRLIQELIRLLQEGDEEKIHEVLSRVFHLLNRALYLFN

SEQ ID NO: 1337 - protein, 224 aa, synthetic construct
  REGION 1..224: note = Synthetic
DEQEYIMLEARLLAREVLRLAKEMGDEELSEAAKRLIQELIRLLQEGDKEKIEQVYTMVSALLLAAEVLRLAKEMGDEELSEAAKRLIQELIRLLQEGDKEKIEQVYTMVSALLLAAEVLRLAKEMGDEELSEAAKRLIQELIRLLQEGDKEKIEQVYIMVSALLLAAEVLRLAKEMGDEELSEAAKRLIQELIRLLQEGDEEKILRVYVEVLYLLLQAELLRR

SEQ ID NO: 1338 - protein, 241 aa, synthetic construct
  REGION 1..241: note = Synthetic
SEEELELHELELIARLVLTIVKLFGAGVEHAKRLFQLILEMIRLWQEYGDEEAKEEAKRLVELLQLIAIALEVLRTVKETGAGVEHAKRLFQLILEMIRLWQEYGDEEAKEEAKRLVELLQLIAIALEVLQTVKETGAGVEHAKRLFQLILEMIRLWQEYGDERAKEEAKKLVILLQLIAIALEVLQTVKETGAGVEHAKRLFQLILEMIRLWQEYGDDEALLRAIHLVLQLELIAHRLED

SEQ ID NO: 1339 - protein, 293 aa, synthetic construct
  REGION 1..293: note = Synthetic
DEEQHETLRAEFLVQQIELLARRLWELTGDETAQQIFELARRILEEVKKMWEIVQNGSEEEIEEALERLKQLIETLLALLLVALILLLAKELWEKTGDETAQQIFELARRILEEVKKMWEIVQNGSEEEIEEALERLKQLIETLLALLLVALILRLAKELWEKTGDETAQQIFELARRILEEVKKMWEIVQNGSEEEIEEALERLKQLILTLLALLLVALILRLAKELWEKRGDEKAQQIFELARRILEEVKKMWEIVQNGSEEEIKEAVERLLELLVRLLYLLLIAEINRHS

SEQ ID NO: 1340 - protein, 297 aa, synthetic construct
  REGION 1..297: note = Synthetic
DELERLFRRIELIIIEAEQIAKELYKEAGDEEAKEIIKQLKEIVQLAYEMVQIYRTAKDEEEIRRAQEILELLLLFAEIVLIILKAILLALRLYKEAGDEEAKEIIKQLKEIVQLAYEMVQIYRTAKDEEEIRRAQEILELLLLFAEIVLIILKAILLALRLYKEAGDEEAKEIIKQLKEIVQLAYEMVQIYRTAKDEEEIRRAQEILELLLLFAEIVLIILKAILLALRLYKEAGDEEAKEIIKQLKEIVQLAYEMVQIYRTAKDEEEIHRAEEILYHLLIFAEYVLQELELRLRS

SEQ ID NO: 1341 - protein, 218 aa, synthetic construct
  REGION 1..218: note = Synthetic
TEIETEAFHLLLLLREITAKAKSEEQSQLAKEAMETIKRVLESGDEEQIRLAISIAQAVIHLYKLQQITAKAKSEEQSQLAKEAMETIKRVIESGDEEQIRLAISIAQAVIHLYKLQQITAKAKSEEQSQLAKEAMETIKRVIESGDEEQIRLAISIAQAVIHLYKLQQITAKAKSEEQSQLAKEAMELIKRVIESGDERRIHSAILFARTVIRHYEL

SEQ ID NO: 1342 - protein, 219 aa, synthetic construct
  REGION 1..219: note = Synthetic
DEKIRHALIILFAVRILAEQAGDPVLIEIAERLAKRLLEILQEGDMEQLERLIKIVQALLLLALVLLFARRAGDPVLIEIAERLAKRLLEILQEGDMEQLERLIKIVQALLLLALVLLMAKAAGDPVLIEIAERLAKRLLEILQEGDMEQLERLIKIVRALLLLALVLLMAKAAGDPVLIEIAERLAKRLLEILQEGDMEQLERLYRIVLELLAHAETS

SEQ ID NO: 1343 - protein, 225 aa, synthetic construct
  REGION 1..225: note = Synthetic
SLVEEWAIEALTIIFELYVRAEVLGDPEFLQIARELLRKLYQALERGSIEDLLVIWWAVSAVLLIMRLYLLALELGDPEFLQIARELLRKLYQALERGSIEDLLVIWWAVSAVLLIMKLYILAKELGDPEFLQIARELLRKLYQALERGSEEDLRVIWLAVSAVLLIMKLYILAKELGDPEFLQIARELLRKLYQALERGSDEDLLRILNEVHIVLYQMKRYIES

SEQ ID NO: 1344 - protein, 219 aa, synthetic construct
  REGION 1..219: note = Synthetic
DEKIVHADVLLYAVRLYAKLAGDPVLIEIAERLAKRLLEILQEGDMEQLERLIKIVQALLLLARVLVVARHAGDPVLIEIAERLAKRLLEILQEGDMEQLERLIKIVQALLLLALVLLMAKAAGDPVLIEIAERLAKRLLEILQEGDMEQLERLIEIVFALLLLALVLLMAKAAGDPVLIEIAERLAKRLLEILQEGDQEQLRRLIEIVLRLLHRAREL

SEQ ID NO: 1345 - protein, 219 aa, synthetic construct
  REGION 1..219: note = Synthetic
IEYVQELETLAQLVEILARHAGNPTLIEIAERLIETLLKILQQGDMEQLRRIIKVVRLALLAARVLLLAKQAGNPTLIEIAERLIETLLKILQQGDHRQLEFIIYVVRLALLAASVLILAKEAGNPTLIEIAERLIETLLKILQQGDLQRLFFILLVVLLALLAALVLLHAKEAGNPTLIEIAERLIETLLKILQQGDSQLLAHIILIVLQALVHAQRL

SEQ ID NO: 1346 - protein, 219 aa, synthetic construct
  REGION 1..219: note = Synthetic
DEKLIEAQILLAVIEHLARRMNDPEALETVRQLEQKIQEIEQQGDDEKLERLLKLVKALYLLMLIYILAELMNDPEALETVRQLLQKIQEIEQQGDDEKLERLLKLVKALYLLMLIYILAKKMNDPEALETVRQLLQKIQEIEQQGDDEKLHRLYLLVLALYLLMLIYLLAKEMNDPEALETVRQLLQKIQEIEQQGDDEKLEKLLEQVIRLYIRMRIL

SEQ ID NO: 1347 - protein, 257 aa, synthetic construct
  REGION 1..257: note = Synthetic
LREVEEFVIELTKRAYELLASSDEEEKEKAEELFETAFLILLVLKSVARAWELAKKILQQGDKEIAQLLREVVRFVIELVLEAARLAASSDEEEHEKAVELIQTAFMIALVLISVARAWELAKKILQQGDKEIAQLLREVVRFVIELVLEAARLAASSDEEEHEKAVELIQTAFMIALVLISVARAWELAKKILQQGDKEIAQLLREVVRFVIELVLEAARLAASSDEEEHRKARELIQEAFHLARKLIQRARHWES

SEQ ID NO: 1348 - protein, 217 aa, synthetic construct
  REGION 1..217: note = Synthetic
DLSEELLLLANQLKTAAELLGDPEMLEVVKQLLQLVIEAAKEGDLEQLRRLFTAILLLFLALQLLIFARDLGDPEMLEVVKQLLQLVIEAAKEGDLEQLRRLFLAILLLLLALRLWLSAKRLGDPEMLEVVKQLLQLVIEAAKEGDLEQLQRLYLAILLLLLALELWESAKRLGDPEMLEVVKQLLQLVIEAAKEGDEEQLERLHQIIERLLLQLEL

SEQ ID NO: 1349 - protein, 253 aa, synthetic construct
  REGION 1..253: note = Synthetic
DELESELLQIKVILLEVILFAEQAGDPELIELARELYKEIIRLAKELQEDPNAEEALEKVRQLYELAEILIMLVKVLQFARQAGDPELIELAKELLKEIIRLAKELQEDPNAEEALEKVRQLYELAEILIMLVKVLQFARQAGDPELIELAKELLKEIIRLAKELQEDPNAEEALKKVRLLYLLAEILIMLVKVLQFARQAGDPELIERAKELLKEIIRLAKELQEDPNADHALRLVSRLYTEARELIERVKS

SEQ ID NO: 1350 - protein, 253 aa, synthetic construct
  REGION 1..253: note = Synthetic
VRQLEELRKIHKALLRVLVFAYEAGDPELIELAKELLKEIIRLAKELQEDPNAEEALEKVRQLYELAEILIMLVKVLEFAREAGDPELIELAKELLKEIIRLAKELQEDPNAEEALEKVRQLYELAEILIMLVKVLQFARQAGDPELIELAKELLKEIIRLAKELQEDPNAEEALEKVRQLYELAEILIMLVKVLQFARQAGDPELIELAKELLKEIIRLAKELQEDPNAEEAREKVLRLYVIAFELIIEVRS

SEQ ID NO: 1351 - protein, 253 aa, synthetic construct
  REGION 1..253: note = Synthetic
DDLEYELLEIILMLRKVLQFARQAGDPELIELAKELLKEIRRLAKELQEDPNAEEALEKVRQLYELAEILIMLVKVLQFARQAGDPELIELAKELLKEIIRLAKELQEDPNAEEALEKVRQLYELAEILIMLVKVLQFARQAGDPELIELAKELLKEIIRLAKELQEDPNAEEALEKVRQLYELAEILIMLVKVLQFARQAGDPELIELAKELLKEIIRLAKELQEDPNAEHALSRVHQLFYLAKRLIERVKV

SEQ ID NO: 1352 - protein, 217 aa, synthetic construct
  REGION 1..217: note = Synthetic
SEEEHILAVALLALVLVRSAGDPKAIEAVREMIKQIAELIKRGDLEELRRLLELAQIISWAILALNYVLQAGDPKAEEAVREMIKQIAELIKRGDLEELRRLLRLAQIILWAIRAWQYVQEAGDPKAIEAVREMIKQIAELIKRGDEERLHHLLLLAEIILHAIRAWQLVQEAGDPKAIEAVREMIKQIAELIKRGDLERLLQLLAIALHLLDLILL

SEQ ID NO: 1353 - protein, 218 aa, synthetic construct
  REGION 1..218: note = Synthetic
DEIEHIETLALLLLVLARLLGDPKAIESAERIIEEIIRLSEEGDLEKMRKFYEILQILLLAVQLWLYAYRLGDPKAIESAERIIEEIIRLSEEGDLEKMRKFYLILRILLLAVQLWLYAQQLGDPKAIESAERIIEEIIRLSEEGDHRKMLRFYLILQILLLAVQLWLYAQRLGDPKAIESAERIIEEIIRLSEEGDLEKMSHFYSILLELLLRVLQS

SEQ ID NO: 1354 - protein, 198 aa, synthetic construct
  REGION 1..198: note = Synthetic
DLREQVEVILQLAQTLARNLGDPEASETVRQLIQNIREGRFSEEEMLLQAIVLFLLLRALLLAQVLGDPEASETVRQLIQNIREGRFSEEEMLLQAIVLLLLLLALQLAQRLGDPEASETVRQLIQNIREGRFSEFEMVLQALVLLLLLKALKLAKELGDPEASETVRQLIQNIREGRFSSEEMLELAFRLLLELLRL

SEQ ID NO: 1355 - protein, 218 aa, synthetic construct
  REGION 1..218: note = Synthetic
DEIEEIEHLAYELLLSARRLGDPKAIESAERIIEEIIRLSEEGDLEKMRKFYEILQILLLAVQLWLYAKRLGDPKAIESAERIIEEIIRLSEEGDLEKMRKFYEILQILLLAVQLWLYAQQLGDPKAIESAERIIEEIIRLSEEGDLEKMRKFYRILQILLLAVQLWLYAQQLGDPKAIESAERIIEEIIRLSEEGDHEKMEHFQQILLRLLLQVELS

SEQ ID NO: 1356 - protein, 167 aa, synthetic construct
  REGION 1..167: note = Synthetic
DEEEHKVRLLIHLLIFLARRTGDPLLRQLAQELLERMFKIVERNDFEKLEKLSEQAKVLILIALLIELARQTGDPLLRQLAQELLERMFKIVERNDFEKLEKLSLQAIVLILIARLIELARQTGDPLLRQLAQELLERMFKIVERNDEEKLYELASLAHHLLLEALR

SEQ ID NO: 1357 - protein, 198 aa, synthetic construct
  REGION 1..198: note = Synthetic
DELEQLESIIHVLEILAKQLLERAKQKGLGVEIFLELLKIVLEVAKSFIFAKDEEEQERMLRLAKEAVQIARLILLALELLERAKQKGLGVEIFLELLKIVLEVAKSFIFAKDEEEQERMLRLAKEAVQIARLILLALELLERAKQKGLGVEIFLELLKIVLEVAKSFIFAKDEYERRKALLLAFQAVLTAEELLHRL

SEQ ID NO: 1358 - protein, 198 aa, synthetic construct
  REGION 1..198: note = Synthetic
LELAERARQIRFLIRLAEQLLENAKYFGLGVEIFLELLKIVLEVAKSFIFAKDEEEQERMLRLAREAVLIARLILNALELLELAKEKGLGVEIFLELLKIVLEVAKSFIFAKDEEEQRRMLELAELAVLIAHLILNALRLLELAKQKGLGVEIFLELLKIVLEVAKSFIFAKDQEEQVRNVLIAAEAVARAIEILLRL

SEQ ID NO: 1359 - protein, 226 aa, synthetic construct
  REGION 1..226: note = Synthetic
DEELFKQVVRKAIEAYREGDEEKLRLIRILLRVLLLALEMYLLSERIQRYYEETGDPRAQELSELAKQVIEKALKAIQEGDEEKLRLIEILLRVLKLAWEMQELSEEIQRYYEETGDPRAQELSELAKQVIEKALKAIQEGDEEKLRLIEILLRVLKLAWEMQELSEEIQRYYEETGDPRAQELSELAKQVIEKALKAIQEGDEEKLQQILVLLKQLKRRWEMQEL

SEQ ID NO: 1360 - protein, 219 aa, synthetic construct
  REGION 1..219: note = Synthetic
ESMVKRIRLLVRVAHLLLLLGDEELAKRYLEEVLELLREISRLAKERNDDESMVLAIQVFVQAAELYLQLGDEEKAKRLLEKVLELLREISRLAKERNDDESMVLAIQVFVQAAELYLQLGDEEKAKRLLEKVLELLREISRLAKERNDDESMVLAIQVFVQAAELYLQLGDEEKAKRLLEKVLELLREISRLAKERNDERSYTLALEVHILAARLRLS

SEQ ID NO: 1361 - protein, 219 aa, synthetic construct
  REGION 1..219: note = Synthetic
DEEVYQIRILVELAERYLQKGDEERAKRILEKVLELLREISRLAKERNDDESMVLAIQVFVQAAELYLQLGDEEKAKRLLEKVLELLREISRLAKERNDDESMVLAIQVFVQAAELYLQLGDEEKAKRLLEKVLELLREISRLAKERNDDESMVLAIQVFVQAAELYLQLGDEEKAKRLLEKVLELLREISRLAKERNDDESLRLANQVRVEAELLEFQ

SEQ ID NO: 1362 - protein, 219 aa, synthetic construct
  REGION 1..219: note = Synthetic
DQEVLRIRALVTYAHFALQEGDEELAKRILEKVLELLREISRLAKERNDDESMVLAIQVFVQAAELYLQLGDEEKAKRLLEKVLELLREISRLAKERNDDESMVLAIQVFVQAAELYLQLGDEEKAKRLLEKVLELLREISRLAKERNDDESMVLAIQVFVQAAELYLQLGDEEKAKRLLEKVLELLREIHRLAKERNDRESHELAVEVYILAIRLEYL

SEQ ID NO: 1363 - protein, 232 aa, synthetic construct
  REGION 1..232: note = Synthetic
SEIIVEILAIIHRAHVFLRHGGEKAKEIVLELMRQVEELLKRATQWAREANDYESIILAIEVIILLAELWLRYGGEEAKEKVLELMRQVEELLKRATQWAREANDYESIILAIQVIISLAELWLRYGGEEAKEKVLELMRQVEELLKRATQWAREANDYESIILAIQVIISLAELWLRYGGEEAKEKVLELMRQVEELLKRATQWAREANDYESIELAQEVENKLYALENQH

SEQ ID NO: 1364 - protein, 219 aa, synthetic construct
  REGION 1..219: note = Synthetic
DEEVQELESLATLAQFLLEAGDEESFREVLERLRELAQQVYESAQKRGDPELMVLALKVFALLAQLYLNAGDEEKFREILERLRELAQQVYESAQKRGDPELMVLALKVFALLAQLYLNAGDEEKFREILERLRELAQQVYESAQKRGDPELMVLALKVFALLAQLYLNAGDEEKFREILERLRELAQQVHESAQKRGDPELEYLAVQVLLILFRLLRN

SEQ ID NO: 1365 - protein, 228 aa, synthetic construct
  REGION 1..228: note = Synthetic
SRLERQVLTLIHAFHLFDDEEFQKQIQEYLKRLLRQAKQLLEEVKRMGDYQAAALALLAAVHLLMILFEAFDDEEEQKRIQEELKELLRQAKQLLEEVKRMGDYQAAALALLAAVHLLMILFEAFDDEEEQKRIQEELKELLRQAKQLLEEVKRMGDYQAAALALLAAVHLLMILFEAFDDEEEQKRIQEELKELLRQARELIKEVIEMGDYEAALIAVFAALLLLRI

SEQ ID NO: 1366 - protein, 234 aa, synthetic construct
  REGION 1..234: note = Synthetic
DELERIALEARILVKRAYLLIKEAGVEDREEVEQVLRTIIQMLLEALRTGDEELFKLALLAALAVWLVASAYLLIKEAGVEDREEVEQVLRTIIQMLLEALRTGDEELFKLALLAALAVWLVASAYLLIKEAGVEDREEVEQVLRTIIQMLLEALRTGDEELFKLALLAALAVWLVASAYLLIKEAGVEDREEVEQILRTIIQMLLEALRTGDRKLFYRALALALYVHFLARNA

SEQ ID NO: 1367 - protein, 234 aa, synthetic construct
  REGION 1..234: note = Synthetic
SHLEQLALEAEYLIELAKTAIRLAGVEDREEVEQVLRTIIQMLLEALRTGDEELFKLALLAALAVFLVASAYFLILIAGVEDREEVEQVLRTIIQMLLEALRTGDEELFKLALLAALAVWLVASAYLLIYRAGVEDREEVEQVLRTIIQMLLEALRTGDEELFRLALIAALAVWLVASAYLLIKEAGVEDREEVEQVLRTIIQMLLEALRTGDRELFEKALKAASEVYLHAFLH

SEQ ID NO: 1368 - protein, 234 aa, synthetic construct
  REGION 1..234: note = Synthetic
DQLEYLAIKAESLVFEAELLIRLAGVEDREEVEQVLRTIIQMLLEALRTGDEELFKLALLAALAVVLVAEAYFYILQAGVEDREEVEQVLRTIIQMLLEALRTGDEELFKLALLAALAVWLVASAYLLIKEAGVEDREEVEQVLRTIIQMLLEALRTGDEKLFLLALDAALAVWLVASAYLLIKEAGVEDREEVEQVLRTIIQMLLEALRTGDEELFIEALVLAFRVFIRARNH

SEQ ID NO: 1369 - protein, 168 aa, synthetic construct
  REGION 1..168: note = Synthetic
DTEFLQMHLLALQVLLTARDLGDEELSEFALRVLKELLELAKSGDLEEAQKNYEFLLMLLLALEVLRIAKQLGDEELSEFALRVLKELLELAKSGDLEEAQKNYFFLLMLLLALEVLRIAKQLGDEELSEFALRVLKELLELAKSGDREKALRIREELHRILIQLLES

SEQ ID NO: 1370 - protein, 219 aa, synthetic construct
  REGION 1..219: note = Synthetic
DELELRLEILLLLIEILSLEAGDEKIRELFEEAVRLLEEARQSGSLEDLKRVYLILQLISLLAQILLYWREAGDEKIRELFEEAVRLLEEARQSGSLEDLKRVYLILQLISLLAQILLYWREAGDEKIRELFEEAVRLLEEARQSGSLEDLKRVYLILQLISLLAQILLYWREAGDEKIRELFEEAVRLLEEARQSGSERDLLHVYLHLLRISHFAQQL

SEQ ID NO: 1371 - protein, 222 aa, synthetic construct
  REGION 1..222: note = Synthetic
EEEILEQLEQAEELIVLVEFYARLAGDEESLEQVRRLFEQMRQYAKMGNLEEAEILFQLIQALLLILLVWYLAKEAGDEESLEQVRRLFEQMRQYAKMGNLEEAEILFQLIQALLLILKVWRLARRAGDEESLEQVRRLFEQMRQYAKMGNLEEAHILFLLILALLLILKVWHLAKEAGDEESLEQVRRLFEQMRQYAKMGNLKEARELFARIQFLLLYLEN

SEQ ID NO: 1372 - protein, 249 aa, synthetic construct
  REGION 1..249: note = Synthetic
AELEELLLEAEKLISELFELVEEMREQGNLEARELYQQAKELFEQIKEYVKQGDYETARLLFLLIQALLLILQLFKLVEEMREQGNLEARELYQQAKELFEQIKEYVKQGDYETAHLLFLLIQALLLILQLFKLVEEMREQGNLEARELYQQAKELFEQIKEYVKQGDRETAYLLFLLIQALLLILQLFKLVEEMREQGNLSARELYQQAKELFEQIKEYVKQGDYERAIELFLQILLNLLLLKLLKRH

SEQ ID NO: 1373 - protein, 249 aa, synthetic construct
  REGION 1..249: note = Synthetic
DRLRQLLIEARELIEELFKLVEEMREQGNLEARELYQQAKELFEQIKEYVKQGDYETARLLFLLIQALLLILQLFKLVEEMREQGNLEARELYQQAKELFEQIKEYVKQGDYETARLLFLLIQALLLILQLFKLVEEMREQGNLEARELYQQAKELFEQIKEYVKQGDYETARLLFLLIQALLLILQLFKLVEEMREQGNLEARELYQQAKELFEQIKEYVKQGDHRRAHQLFVRIELLLQHLERFKES

SEQ ID NO: 1374 - protein, 222 aa, synthetic construct
  REGION 1..222: note = Synthetic
DELERYLLEIKILIEHILELAKKQGDEEAFETAEQLMEELQRVREEGDLEKVKLVTYLAQIAWYILLILELAKKQGDEEAFETAEQLMEELQRVREEGDLEKVKLVTYLAQIAWYILLILELAKKQGDEEAFETAEQLMEELQRVREEGDLEKVKLVTYLAQIAWYILLILELAKKQGDEEAFEIAEQLMEELQRVREEGDRRRVLEVTLLAQLAYYLLQHD

SEQ ID NO: 1375 - protein, 222 aa, synthetic construct
  REGION 1..222: note = Synthetic
DELEHYLRLILLIIVFILILAKEQGDEEAFETAEQLMEELQRVREEGDLEKVKLVTYLAQIALYILLILLLAKRQGDEEAFETAEQLMEELQRVREEGDLEKVKLVTFLAQIAWYILLILTLAKKQGDEEAFETAEQLMEELQRVREEGDLRKVILVTNLAQIAWFILLILELAKKQGDEEAFETAEQLMEELQRVREEGDLKKVLQVTVQAQYAYQLLRVS

SEQ ID NO: 1376 - protein, 228 aa, synthetic construct
  REGION 1..228: note = Synthetic
DTLLLRVLLLILLFELFDDEEYQKRIQEELKELLRQAKQLLEEVKRMGDYQAAALALLAAVHLLMILFEAFDDEEEQKRIQEELKELLRQAKQLLEEVKRMGDYQAAALALLAAVHLLMILFEAFDDEEEQKRIQEELKELLRQAKQLLEEVKRMGDYQAAALALLAAVHLLMILFEAFDDEEEQKRIQEELKELLRQAQQLVEEVLKMGDDHAALLAVYAALLLYKS

SEQ ID NO: 1377 - protein, 222 aa, synthetic construct
  REGION 1..222: note = Synthetic
DKLHQLFLLANAYASLIEFLAKQTGDEEAVESAQEIREELRQVFEQNDLEKLKLVLLFAQAIYYALLILLYAKKTGDEEAVESAQEIFEELRQVREQNDLEKLKLVLLFAQAIWYALLILLLAKRTGDEEAVESAQEIFEELRQVREQNDLRKLLLVLLFAQAIWYALLILELAKRTGDEEAVESAQEIFEELRQVREQNDLHRLLRVLEKAITILNELRVN

SEQ ID NO: 1378 - protein, 222 aa, synthetic construct
  REGION 1..222: note = Synthetic
SEHEELIVRAHVFALLVEIIAELAGDEELKELVRRILESLREALQRNDKELAKMVWLIASAVYYAALVLLIAQEAGDEELKELVRRILESLREALQRNDKELAKMVWLIASAVWYAALVLKIAQEAGDEELKELVRRILESLREALQRNDKHLAEMVWLIASAVWFAALVLKIAQEAGDEELKELVRRILESLREALQRNDLELALRVYTEALYVAHLARQL

SEQ ID NO: 1379 - protein, 222 aa, synthetic construct
  REGION 1..222: note = Synthetic
DKMEELIVEASALAHYVELIAREAGDEELKELVRRILESLREARQRNDKELAKMVWLIASAVYYAALVLRIAQRAGDEELKELVRRILESLREALQRNDKELAKMVWLIASAVWYAALVLRIAQEAGDEELKELVRRILESLREALQRNDKELAKMVWLIASAVWYAALVLKIAQEAGDEELKELVRRILESLREALQRNDKELAQRVFIHAIRVFLEAQES

SEQ ID NO: 1380 - protein, 236 aa, synthetic construct
  REGION 1..236: note = Synthetic
SEFRRIKILAELIVRELFEKAGGDPEKAFQMLIIAIEIVKKLAKELGLSEEQLERLNFEVIKTFAIELVKELFRQAGGDPEKAFQMLIIAIEIVKKLAKELGLSEEQLERLNFEVIKTFAIELVKELFRQAGGDPEKAFQMLIIAIEIVKKLAKELGLSEEQLRRLNFEVIRTFAIELVKELFRQAGGDPEKAFQMLIIAIEIVKKLAKELGLSEEQLEFLETVVRYVFLEDHLEE

SEQ ID NO: 1381 - protein, 256 aa, synthetic construct
  REGION 1..256: note = Synthetic
DELEEILLEIELIALRARRIAKELLQKYGDPSAQEILEIALEIVQRAKEALLMGDEEKLRLLLILIEILLLAALAMLIAVKLLQKYGDPSAQEILEIALEIVQRAKEALLMGDEEKLRLLLILIEILLLAALAMLIAVKLLQKYGDPSAQEILEIALEIVQRAKEALLMGDEEKLRLLLILIEILLLAALAMLIAVKLLQKYGDPSAQEILEIALEIVQRAKEALLMGDEEKLYELLLLIRHLLQEAEQMLERVKH

SEQ ID NO: 1382 - protein, 256 aa, synthetic construct
  REGION 1..256: note = Synthetic
DEEETILARILEIAARAISVARKLLQKYGDPSAQEIREIAREISQRAKEALLMGDEEKLRLLLILIEILLLAALAMLIAVKLLQKYGDPSAQEILEIALEIVQRAKEALLMGDEEKLRLLLILIEILLLAALAMLIAVKLLQKYGDPSAQEILEIALEIVQRAKEALLMGDEEKLRLLLILIEILLLAALAMLIAVKLLQKYGDPSAQEILEIALEIVQRAKEALLMGDERKLLRLLVEIIHLLLHAEVLLYEVKS

SEQ ID NO: 1383 - protein, 256 aa, synthetic construct
  REGION 1..256: note = Synthetic
SELELILRLIETLALLAYAIAYALRHHHGDPSAQEILEIALEIVQRAKEALLMGDEEKLRLLLILIEILLLAALAMFIAVILLLNYGDPSAQEILEIALEIVQRAKEALLMGDEEKLKLLLILIRILLLAALAMLIAVELLQLYGDPSAQEILEIALEIVQRAKEALLMGDKHKLILLLILILILLLAALAMLIAVKLLKKYGDPSAQEILEIALEIVQRAKEALLMGDEEKLERLYELISRLLSRAFLLLLRVEL

SEQ ID NO: 1384 - protein, 256 aa, synthetic construct
  REGION 1..256: note = Synthetic
DELEKILYEIRAIADTAKHVAHYLLRHYGDPSAQEILEIALEIVQRAKEALLMGDEEKLRLLLILIEILLLAALAMRIAVELLKRYGDPSAQEILEIALEIVQRAKEALLMGDEHKLRLLLILIEILLLAALAMLIAVKLLQKYGDPSAQEILEIALEIVQRAKEALLMGDEHKLHLLLILIEILLLAALAMLIAVKLLQKYGDPSAQEILEIALEIVQRAKEALLMGDEEKLLKLLLLIIELLLRARRMLRAVKS

SEQ ID NO: 1385 - protein, 253 aa, synthetic construct
  REGION 1..253: note = Synthetic
LELLSLLEKIRRFVLKALAIARYLRLLAGDPAAKELEQLAEEILQRAKEMLELGDYEQLELLSLLVKILWFVALAVVIAIELLHLAGDPAAKELSQLALEIVQRAKEMLELGDYEQLELLSLLVKILWFVALAVLIAIKLLREAGDPAAKELSQLALEIVQRAKEMLELGDYEQLELLSLLVKILWFVALAVLIAIKLLREAGDPAAKELSQLALEIVQRAKEMLELGDYEQLQELSELVERLFLKAKEVLQR

SEQ ID NO: 1386 - protein, 249 aa, synthetic construct
  REGION 1..249: note = Synthetic
SEENELILKAEELVREVLRLMLEIKQRGNPLYEIAEELAKTALELWRRVQETNDLETLQLLLLILQAAWLVIEVLRLMLEIKQRGNPLYEIAEELAKTALELWRRVKETNDLETLQLLLLILQAAWLVIEVLRLMLEIKQRGNPLYEIAEELAKTALELWRRVKETNDLETLQLLLLILQAAWLVIEVLRLMLEIKQRGNPLYQIAEDLAKLALELWRRVKETNDLETLKDLLYLLILAWLIIEHFRRS

SEQ ID NO: 1387 - protein, 210 aa, synthetic construct
  REGION 1..210: note = Synthetic
DEERLEAERILSEIEYIARQAGNPELEESVRQNVQKLEQASGEEDIRRIMELAKALLLLALIFLIAVRAGNPELEESVRQNVQKLEQASGEEDIRRIMELAKALLLLALIFLIAKQAGNPELEESVRQNVQKLEQASGEEDIRRISLLAQALLILALIFLIAKQAGNPELEESVRQNVQKLEQASGEEDIKRILEEAARLLVRAELVLRS

SEQ ID NO: 1388 - protein, 249 aa, synthetic construct
  REGION 1..249: note = Synthetic
DEEEELIEQAYRLVLRVRSLMEEIKQRGNPLYEIAEELAKTALELLRRVEETNDLETLQLLLLILQAAWLVIEVLRLMLEIKQRGNPLYEIAEELAKTALELWRRVKETNDLETLQLLLLILQAAWLVIEVLRLMLEIKQRGNPLYEIAEELAKTALELWRRVKETNDLETLQLLLLILQAAWLVIEVLRLMLEIKQRGNPLYRIAERLAKLALELWRRVKETNDRKHLHLLLLQLEHAHTLIRRLVRD

SEQ ID NO: 1389 - protein, 249 aa, synthetic construct
  REGION 1..249: note = Synthetic
DEREELIHEAAILVIRVLILMQQIKRRGNPLYEIAEELAKTAEELLRRVLETNDLETLQLLLLILQAAWLVIEVLRLMLEIKQRGNPLYEIAEELAKTALELWRRVKETNDLETLQLLLLILQAAWLVIEVLRLMLEIKQRGNPLYEIAEELAKTALELWRRVKETNDLETLQLLLLILQAAWLVIEVLRLMLEIKQRGNPLYEYAEELAKTALELWRRVKETNDLETLRHLLTLLELAWYVIESLHRN

SEQ ID NO: 1390 - protein, 249 aa, synthetic construct
  REGION 1..249: note = Synthetic
SELRLLIRLAEYLVKEVTFLAFHIKREGNPLYEIAEELAETAFELLRRVRETNDLETLQLLLLILQAAWLVIEVLRLMLEIKQRGNPLYEIAEELAKTALELWRRVKETNDLETLQLLLLILQAAWLVIEVLRLMLEIKQRGNPLYEIAEELAKTALELWRRVKETNDLETLQLLLLILLAAWLVIEVLRLMLEIKQQGNPLYRIAEELAKTALELWRRVKETNDLETLKELLLELFRALYIILLLYNL

SEQ ID NO: 1391 - protein, 258 aa, synthetic construct
  REGION 1..258: note = Synthetic
LQIEEAEEQALRLFSLIFDLALKSLRRDPNAAEFREVWRDAKEMLRLVIELSERGDLEKLQILLALLQALLLVLQISKLAQESLERDPNAAEFREVWRDAKEMLRLVKELSERGDLEKLQILLALLQALLLVLQISKLAQESLERDPNAAEFREVWRDAKEMLRLVKELSERGDLEKLQILLALLQALLLVLQISKLAQESLERDPNAADFREVWRDAKEMLRLVKELSERGDKEKLDRLLIILESLLRELELLKRLL

SEQ ID NO: 1392 - protein, 249 aa, synthetic construct
  REGION 1..249: note = Synthetic
LRREILRERAFELVTRVVFIAIQIKEEGDPLFEEAEELAQQARELVERAQKSTDEEELRMLILILQALLLVIQVLKLAEEIKKQGDPLFEEAEELAQQARELVERARKSTDEEELRMLILILQALLLVIQVLKLAEEIKKQGDPLFEEAEELAQQARELVERARKSTDEEELRMLILILQALLLVIQVLKLAEEIKKQGDPLFEDAERLAQQARELVERARKSTDEHELYELILTLFFLLTVIELLKEL

SEQ ID NO: 1393 - protein, 249 aa, synthetic construct
  REGION 1..249: note = Synthetic
LRMEILQRQALLLVILVDFLAQEIKRQGDPLFEEAEELAQQARELVERARKSTDEEELRMLILILQALLLVIQVLKLAEEIKKQGDPLFEEAEELAQQARELVERARKSTDEEELRMLILILQALLLVIQVLKLAEEIKKQGDPLFEEAEELAQQARELVERARKSTDEEELRMLILILQALLLVIQVLKLAEEIKKQGDPLFEEAEELAQQARELVERARKSTDEQELRELILRLEHLLTIIRQLKEL

SEQ ID NO: 1394 - protein, 258 aa, synthetic construct
  REGION 1..258: note = Synthetic
DELLYEILRLAKQVFYLMSQAKEAGMPEEIIKTLRELAENVYEAAQRLKESGDEEEARFLLLLAQILLLAVQVFYLMSQAKEAGMPEEIIKTLRELAENVYEAAQRLKESGDEEEARFLLLLAQILLLAVQVFYLMSQAKEAGMPEEIIKTLRELAENVYEAAQRLKESGDEEEARFLLLLAQILLLAVQVFYLMSQAKEAGMPEHIIKLLRETAEKVYEAAQRLKESGDEEEARRLLHYAELLLQIVRALFRLSELE

SEQ ID NO: 1395 - protein, 258 aa, synthetic construct
  REGION 1..258: note = Synthetic
DELEREILRLALEVHYIMRRAERAGMPEEIIKTLRELAENVYEAAQRLKESGDEEEARFLLLLAQILLLAVQVFYLMSQAKEAGMPEEIIKTLRELAENVYEAAQRLKESGDEEEARFLLLLAQILLLAVQVFYLMSQAKEAGMPEEIIKTLRELAENVYEAAQRLKESGDEEEARFLLLLAQILLLAVQVFYLMSQAKEAGMPEEIIKTLRELAENVYEAAQRLKESGDEKEARHLLRRAELLLQLVRVHYEESQES

SEQ ID NO: 1396 - protein, 258 aa, synthetic construct
  REGION 1..258: note = Synthetic
DELEFEIFRLALEVHYIAKKAERAGMPEEIIKTLRELAENVYEAAQRLKESGDEEEARFLLLLAQILLLAVQVFYLMSQAKEAGMPEEIIKTLRELAENVYEAAQRLKESGDEEEARFLLLLAQILLLAVQVFYLMSQAKEAGMPEEIIKTLRELAENVYEAAQRLKESGDEEEARFLLLLAQILLLAVQVFYLMSQAKEAGMPEEIIKTLRELAENVYEAAQRLKESGDEEEARRLLLIAELLLRRVELHYEYSQHH

SEQ ID NO: 1397 - protein, 258 aa, synthetic construct
  REGION 1..258: note = Synthetic
DDLLEQIEKLAELVFSIAFLAEYAGMPEEIIKTLRELAENVQEAAQRLKESGDEEEARFLLLLAQILLLAVQVFYLMSRAKRAGMPEEIIKTLRELAENVYEAAQRLKESGDEEEARFLLLLAQILLLAVQVFYLMSRAKRAGMPEEIIKTLRELAENVYEAAQRLKESGDEEEARFLLLLAQILLLAVQVFYLMSKAKRAGMPEEIIKTLRELAENVYEAAQRLKESGDEEEARFLLEVALRLLLEVEIKYRQSEEK

SEQ ID NO: 1398 - protein, 210 aa, synthetic construct
  REGION 1..210: note = Synthetic
DEERLRAEYILLRIETIARYAGNPELEESVRQNLQKLEQASGEEDIRRIMELAKALLLLALIFLIAVEAGNPELEESVRQNVQKLEQASGEEDIRRIMELAKALLLLALIFLIAKQAGNPELEESVRQNVQKLEQASGEEDIRRIMLLARALLILALIFLIAKQAGNPELEESVRQNVQKLEQASGEEDIKRIYQEALRLLAEALIFLDH

SEQ ID NO: 1399 - protein, 251 aa, synthetic construct
  REGION 1..251: note = Synthetic
ELVLLEIEKLLKQATHQFQHLRRRGDLEKLKEMFERIKQLFEEVQRLLEEAKRLGDPELVLLAIEILLQAATSLFQNLRQQGDLEKLKEMFERIKQLFEEVQRLLEEAKRLGDPELVLLAIEILLQAATSLFQNLRQQGDLEKLKEMFERIKQLFEEVQRLLEEAKRLGDPELVLLAIEILLQAATSLFQNLRQQGDLEKLKEMFERIRQLYEEVKRLLEEAERLGDPRLERLALRILVFAVESLLRNEEQ

SEQ ID NO: 1400 - protein, 251 aa, synthetic construct
  REGION 1..251: note = Synthetic
SKELLSIELRLQVAQNLFQLALRNGDLEELKEIFERIKQLFEEVQRLLEEAKRLGDPELVLLAIEILLQAATSLFQNLRQQGDLEKLKEMFERIKQLFEEVQRLLEEAKRLGDPELVLLAIEILLQAATSLFQNLRQQGDLEKLKEMFERIKQLFEEVQRLLEEAKRLGDPELVLLAIEILLQAATSLFQNLRQQGDLEKLKEMFERIKQLFEEVERLLEEARRLGDPELVRLATEILIQAYISLLRNRSQ

SEQ ID NO: 1401 - protein, 251 aa, synthetic construct
  REGION 1..251: note = Synthetic
ELVLLAIEELLKLAQEAFQNLLRLGDLEALKRAFETIKQLFEEVQRLLEEAKRLGDPELVLLAIEILLQAATSLFQNLRQQGDLEKLKEMFERIKQLFEEVQRLLEEAKRLGDPELVLLAIEILLQAATSLFQNLRQQGDLEKLKEMFERIKQLFEEVQRLLEEAKRLGDPELVLLAIEILLQAATSLFQNLRQQGDLEKLKEMFERIKQLFEEVQRLLEEAKRLGDPELEKLALRILYFAFHSLFENREQ

SEQ ID NO: 1402 - protein, 225 aa, synthetic construct
  REGION 1..225: note = Synthetic
DERESLILRVLVLIILALIAAHETGDEKIKELAEQLFELLQEAREANDEELIKIILLIAQVAFLIVQALLLYRKTGDEKILELAEQLFELLQEAREANDEELIKIILLIAQVAFLIVQALLLYRKTGDEKILELAEQLFELLQEAREANDEELIKIILLIAQVAFLIVQALLLYRKTGDEKILELAEQLFELLQEAREANDEELIEEILLDAEHALQRVKRLLRS

SEQ ID NO: 1403 - protein, 250 aa, synthetic construct
  REGION 1..250: note = Synthetic
DELQLEIQRLLITIRFTAESVKKLAGDEEAEELMKQAKELYRKVYEALANGNKEEWEKYFRLLQIASLLIFIIYLAIQVKRLAGDEEAEELMKQAKELYRKVYEALANGNKEEWEKYFRLLQIASLLIFIIFLAIQVKRLAGDEEAEELMKQAKELYRKVYEALANGNKEEWEKYFRLLQIASLLIFIIFLAIQVKRLAGDEEAEETMKEAKELYRKVYEALANGNREEWRRNYLLLLAAVILIFRIFLA

SEQ ID NO: 1404 - protein, 178 aa, synthetic construct
  REGION 1..178: note = Synthetic
LVREAYYLAQILLLRFQLEGDERLLEKVEEILKILIELLRKSTDPEILVQIASSIAQLLLQMYRETGDERLLEKVEEILKILIELLRKSTDPEILVQIASSIAQLLLQMYRETGDERLLEKVEEILKILIELLRKSTDPEILRQIAHDIALLLAQMALVLGDERLLEKVEEILRIYIS

SEQ ID NO: 1405 - protein, 231 aa, synthetic construct
  REGION 1..231: note = Synthetic
DKELEELRLRVREHIIEMAQSSDPEAQKAFEFAVELLQRAQEYLEMGDYEKVETLLRLALLFLQVVKHIIEMAQSSDPEAQKAFEFAVELLQRAQEYLEMGDYEKVETLLRLALLFLQVVKHIIEMAQSSDPEAQKAFEFAVELLQRAQEYLEMGDYEKVERLLKLALLFLQVVKHIIEMAQSSDPLAQRAFEHAVELLQRAQEYLEMGDLNQVYLLLVTALTILRAVKRL

SEQ ID NO: 1406 - protein, 233 aa, synthetic construct
  REGION 1..233: note = Synthetic
SVREIAEILAHRIYFHILLLIHQATDEEEIKELLRKLLETIKQLAKMAGVPEEEIVRLMAQLAAQVIFLFILELIKQATDEEEIKELLRKLLETIKQLAKMAGVPEEEIVRLMAQLAAQVIFEFILELIKQATDEEEIKELLRKLLETIKQLAKMAGVPEEEIVRLMAELAAQVIFEFILELIKQATDEEEIKELLRKLLETIKQLAKMAGVPEKQIEHLAKLLALKVRQVFH

SEQ ID NO: 1407 - protein, 233 aa, synthetic construct
  REGION 1..233: note = Synthetic
SVRERARIRALKIFLEILELILQATDEEEIKELLRKLLETIKQLAKMAGVPEEEIVRLMAQLAAQVIFHFILELIKQATDEEEIKELLRKLLETIKQLAKMAGVPEEEIVRLMAQLAAQVIFEFILELIKQATDEEEIKELLRKLLETIKQLAKMAGVPEREIVKLMAQLAAQVIFEFILELIKQATDEEEIKELLRKLLETIKQLAKMAGVPEDFIRLLMHYLAVEVKHEFS

SEQ ID NO: 1408 - protein, 237 aa, synthetic construct
  REGION 1..237: note = Synthetic
SELLRLLYLLYEIARFLIEFTKKYGDPRLRELMQQVLELLRKAEEAYQLGDKETLELILLLAQLVLIAAFLIEFTKKYGDPRLRELMQQVLELLRKAQEATELGDKETLELILLLAQLVLIAAFLIEFTKKYGDPRLRELMQQVLELLRKAQEATELGDKETLELILLLAQLVLIAAFLIEFTKKYGDPRLRLLMEIVLELLRKAQEATELGDKELLKKILEFAELLLTLAEHIERS

SEQ ID NO: 1409 - protein, 213 aa, synthetic construct
  REGION 1..213: note = Synthetic
DEELVEALSLAYHVLLIARIANNPEFEETVKEILRRLKQHASDEEHIRQMLELAKAIVLAIQVFHIAKKANNPEFEETVKEILRRLKQHASDEEHIRQMLELAKAILLAIQVFLIAKEANNPEFEETVKEILRRLKQHASDEEHIRQMLELAEAILLAIQVFLIAKEANNPEFEETVKEILRRLKQHASDEEHILKMLVLAHEILLRIQRFLS

SEQ ID NO: 1410 - protein, 237 aa, synthetic construct
  REGION 1..237: note = Synthetic
DELLELLLLLHYIALRLEEFTRKYGDPRLRELMQQVLELLRKAEEASRLGDKETLELILLLAQLVLIAAFLIEFTKKYGDPRLRELMQQVLELLRKAQEATELGDKETLELILLLAQLVLIAAFLIEFTKKYGDPRLRELMQQVLELLRKAQEATELGDKETLELILLLAQLVLIAAFLIEFTKKYGDPELRKLMQQVLELLRKAQEATELGDKETLRRILIHAQSVLITAHLLERS

SEQ ID NO: 1411 - protein, 237 aa, synthetic construct
  REGION 1..237: note = Synthetic
DELYHLLSLLYRIAEFLIEFTKKYGDPRLRELMQQVLELLRKAQEATELGDKETLELILLLAQLVLIAAFLIEFTKKYGDPRLRELMQQVLELLRKAQEATELGDKETLELILLLAQLVLIAAFLIEFTKKYGDPRLRELMQQVLELLRKAQEATELGDKETLELILLLAQLVLIAAFLIEFTKKYGDPRLRRLMEIVLELLRKAQEATELGDRLLLEVILIAALYVLYLAFQIEFT

SEQ ID NO: 1412 - protein, 265 aa, synthetic construct
  REGION 1..265: note = Synthetic
VEIEKIRLIAERVLQVLYEARNLARLLNSPEARRILELVKELVERAIQAARKFEETGDPKAVEIIKIMLIAVLVLLILLQATQLAQELNSPEARRILELVKELVERAIQAARKFEETGDPKAVEIIKIMLIAVLVLLILLQATKLAQELNSPEARRILELVKELVERAIQAARKFEETGDPKAVEIIHIMLIAVLVLLILLQATKLAQELNSPEARRILELVKELVERAIQAARKFEETGDPKAVEIIRRMLALVNYLLELLELL

SEQ ID NO: 1413 - protein, 277 aa, synthetic construct
  REGION 1..277: note = Synthetic
LEREQLIEIVSLVSYILHSVEFLAKFLLKYGDKEAKEIMELIYELVQKAREAVETLEETGDPRALEIAQLILIAVQVLLILLLVIRLARELLKYGDKEAKEIMELIYELVQKAIEAVQTLEETGDPRALEIAQLILIAVQVLLILLLVIKLARELLKYGDKEAKEIMELIYELVQKAIEAVQTLEETGDPRALEIAQLILIAVQVLLILLLVIKLARELLKYGDKEAKEIMELIYELVQKAIEAVQTLEETGDPRAREIARRILFEVRILLERLLEI

SEQ ID NO: 1414 - protein, 249 aa, synthetic construct
  REGION 1..249: note = Synthetic
DWALENLARALLLLHLIIRLVEELRRKDPKTAQEVQEEAKRLIQQILEAYENGDKEKLWAALMLVQALYLLLLIIKLVEELRRKDPKTAQEVQEEAKRLIQQILEAFENGDKEKLWAALMLVQALWLLLEIIKLVEELRRKDPKTAQEVQEEAKRLIQQILEAFENGDKRKLHAALLLVQALWLLLEIIKLVEELRRKDPKTAQRVQEEAKRLIQQILEAFENGDERKLIEALHQVLILFLFLRHLKLL

SEQ ID NO: 1415 - protein, 249 aa, synthetic construct
  REGION 1..249: note = Synthetic
SWAERLVLEALYLLHLIERLVEELRRKDPKTAQEVQEEAKRLIQQILEAYENGDKEKLWAALMLVQALWLLLEIIKLVEELRRKDPKTAQEVQEEAKRLIQQILEAFENGDKEKLWAALMLVQALWLLLEIIKLVEELRRKDPKTAQEVQEEAKRLIQQILEAFENGDKEKLWAALALVQALWLLLEIIKLVEELRRKDPKRAQEVQEEAKRLIQQILEAFENGDRKKLIEALIVVELLHIYLQRQKEA

SEQ ID NO: 1416 - protein, 254 aa, synthetic construct
  REGION 1..254: note = Synthetic
DEEEHHLRRLLIEAELIVKRIEKLVRKTGDYEILEKARQLLEELEEAIRLFKETGDPKAKELAELMFLAIQALLLVVQITELVRKTGDYEILEKARQLLEELEEAIRLFKETGDPKAKELAELMFLAIQALLLVVQITELVRKTGDYEILEKARQLLEELEEAIRLFKETGDPKAKELAELMFLAIQALLLVVQITELVRKTGDYEVLEKARQLLEELEEAIRLFKETGDPRAFKRAEINFLDIEHLLRRVQIS

SEQ ID NO: 1417 - protein, 254 aa, synthetic construct
  REGION 1..254: note = Synthetic
SEEEEELHHLLLEAHFIVLQITNLVRKTGDYEILEKARQLLEELEEAIRLFKETGDPKAKELAELMFLAIQALLLVVQITELVRKTGDYEILEKARQLLEELEEAIRLFKETGDPKAKELAELMFLAIQALLLVVQITELVRKTGDYEILEKARQLLEELEEAIRLFKETGDPKAKELAELMFLAIQALLLVVQITELVRKTGDYEDLEKARQLLEELEEAIRLFKETGDPRAFRRALRAFLLIEYLLLVVEVS

SEQ ID NO: 1418 - protein, 253 aa, synthetic construct
  REGION 1..253: note = Synthetic
SEEENRFELLVLEIIRLALRLIKQLGDESAKELAREVLELLRKFVEMLRLGDEEKAQQILEILEFIYLVLLIILLALRLIKQLGDESAKELAREVLELLRKFVEMLRLGDEEKAQQILEILEFIYLVLLIILLALRLIKQLGDESAKELAREVLELLRKFVEMLRLGDEEKAQQILEILEFIYLVLLIILLALRLIKQLGDESAKELAREVLELLRKFVEMLRLGDEKKALRILLLLYKILLELRFLLLELEN

SEQ ID NO: 1419 - protein, 253 aa, synthetic construct
  REGION 1..253: note = Synthetic
SEEELHFEYLVLEIELLAYYLEVILGDESAKELAREVLELLRKFVEMLRLGDEEKAQQILEILEFIYLVLLIIILALRLIRQLGDESAKELAREVLELLRKFVEMLRLGDEEKAQQILEILEFIYLVLLIILLALRLIKQLGDESAKELAREVLELLRKFVEMLRLGDEEKAQQILEILEFIYLVLLIILLALRLIKQLGDESAKELAREVLELLRKFVEMLRLGDEEKAEQIFEILLRIRQELEEILRRLRS

SEQ ID NO: 1420 - protein, 207 aa, synthetic construct
  REGION 1..207: note = Synthetic
LEQRRRVESLILLIEVIAYEAGSEELKEFAREMLERLQRDTTGEDLEKLQQRVKVALLIALIISIARRAGSEELKEFAREMLERLQRDTTGEDLEKLQQRVKVALLIALIILIAKQAGSEELKEFAREMLERLQRDTTGEDLEKLQLRVEVALLIALIILIAKQAGSEELKEFAREMLERLQRDTTGDDLYKLLELVLKALLEARRI

SEQ ID NO: 1421 - protein, 253 aa, synthetic construct
  REGION 1..253: note = Synthetic
DKIEELLLRAQELVFRAKRLADRLQEKTGDPKAREIAERIFEILERMIRASQEGDKEKVKILLLLAQAILLVALALLLADELQEKTGDPKAREIAERIFEILERMIRASQEGDKEKVKILLLLAQAILLVALALLLADELQEKTGDPKAREIAERIFEILERMIRASQEGDKEKVKILLLLAQAILLVALALLLADELQEKTGDPQAREIAERIFEILERMIRASQEGDERKVFQLLLLAFYILLLAEYLLKH

SEQ ID NO: 1422 - protein, 253 aa, synthetic construct
  REGION 1..253: note = Synthetic
DKLEELLIEAFHLVASAHHLAKKLQEKTGDPKAREIAERIFEILERMIRASQEGDKEKVKILLLLAQAILLVALALLLADELQEKTGDPKAREIAERIFEILERMIRASQEGDKEKVKILLLLAQAILLVALALLLADELQEKTGDPKAREIAERIFEILERMIRASQEGDKEKVKILLLLAQAILLVALALLLADELQEKTGDPRAREIAERIFEILERMIRASQEGDHRKVFELLVDAEHILQFAELLLRL

SEQ ID NO: 1423 - protein, 222 aa, synthetic construct
  REGION 1..222: note = Synthetic
DEIEQLALHAEYNLRTAENIAREAGDEEVSETLKELLRRLKELTQQGDYEQLRILVLAAEAIMNLAKALKIAQEAGDEEVSETLKELLRRLKELTQQGDYEQLRILVLAAEAIMNLAKALKIAQEAGDEEVSETLKELLRRLKELTQQGDYEQLRILVLAAEAIMNLAKALKIAQEAGDEEVSETLKELLRRLKELTQQGDHEKLLELVFLAELIMIRAKLS

SEQ ID NO: 1424 - protein, 254 aa, synthetic construct
  REGION 1..254: note = Synthetic
DDLAAQVLVLHVEIRKLLLELKRAGMSEEQLERLKQQIEEVIESALEALRRGDETLAKLALLAMKVLFLSVQILKLLLELKRAGMSEEQLERLKQQIEEVIESALEALRRGDETLAKLALLAMKVLFLSVQILKLLLELKRAGMSEEQLERLKQQIEEVIESALEALRRGDETLAKLALLAMKVLFLSVQILKLLLELKRAGMSEEQLERLKQQIEEVIESALEALRRGDERLAHRAVLLMHVLFFLVLLLKTS

SEQ ID NO: 1425 - protein, 254 aa, synthetic construct
  REGION 1..254: note = Synthetic
DDLALQVEFLATHIKKLLLELKRAGMSEEQLERLKQQIEEVIESALEATRRGDETLAKLALLAMKVLFLSVQILKLLLELKRAGMSEEQLERLKQQIEEVIESALEALRRGDETLAKLALLAMKVLFLSVQILKLLLELKRAGMSEEQLERLKQQIEEVIESALEALRRGDETLAKLALLAMKVLFLSVQILKLLLELKRAGMSEEQLERLKQQIEEVIESALEALRRGDHQLALRAYLRMLELFLIVRELKES

SEQ ID NO: 1426 - protein, 257 aa, synthetic construct
  REGION 1..257: note = Synthetic
DLVERLVHRVEFIFNEILELLKELKRAGMSEEELERIKQQAEEITRWAIEAVRQGDPVLALVALLVMKVLLIFVQILKLLLELKQAGMSEEELERIKQQAEEITRWAIEAVRQGDPVLALVALLVMKVLLIFVQILKLLLELKQAGMSEEELERIKQQAEEITRWAIEAVRQGDPVLALVALLVMKVLLIFVQILKLLLELKQAGMSEEELERIKQQAEEITRWAIEAVRQGDPQLAKRALLIMLIILLEVERLRTS

SEQ ID NO: 1427 - protein, 257 aa, synthetic construct
  REGION 1..257: note = Synthetic
DLVAELVEEVREIFQKIEVYLRFLKELGMSEEELERIKQQAEEITRWAIEAVRQGDPVLALVALLVMKVLLIFVQILVLLLELKRAGMSEEELERIKQQAEEITRWAIEAVRQGDPVLALVALLVMKVLLIFVQILKLLLELKQAGMSEEELERIKQQAEEITRWAIEAVRQGDPELALVALLVMKVLLIFVQILKLLLELKQAGMSEEELERIKQQAEEITRWAIEAVRQGDPRLAHQALLIMLELLFTVRLLKKS

SEQ ID NO: 1428 - protein, 245 aa, synthetic construct
  REGION 1..245: note = Synthetic
SEKENELIRTMLELHEIVEKLKRMGRPEARKIAQTAREIIERILEALRNGDEEELKRLLKLAQLVKTMFELLQIVEQLKRMGRPEARKIAQTAREIIERILEALRNGDEEELKRLLKLAQLVKTMFELLQIVEQLKRMGRPEARKIAQTAREIIERILEALRNGDEEELKRLLKLAQLVKTMFELLQIVEQLKRMGRPEARRIAELAREIIERILEALRNGDERLLRQLLLLARAVKILFEATRS

SEQ ID NO: 1429 - protein, 245 aa, synthetic construct
  REGION 1..245: note = Synthetic
DEKEFELRRTVLELELIVKLLKRMGRPEARKIAQTAREIIERILEALRNGDEEELKRLLKLAQLVKTMFELLQIVEQLKRMGRPEARKIAQTAREIIERILEALRNGDEEELKRLLKLAQLVKTMFELLQIVEQLKRMGRPEARKIAQTAREIIERILEALRNGDEEELKRLLKLAQLVKTMFELLQIVEQLKRMGRPRAREIAQLAREIIERILEALRNGDEQLLRHLLHLARSVKEQFEHLQS

SEQ ID NO: 1430 - protein, 218 aa, synthetic construct
  REGION 1..218: note = Synthetic
DERILELLRELTRRITEALEAGDREKFEELVQFLEAALQVYRAIKEAEELKKLGDPRALRIVELLLELVQRIVEAILAGDFEKMQELLQFLKAATQVLRAIKEAEELKKLGDPRALRIVELLLELVQRIVEAILAGDFEKMQELLQFLKAATQVLRAIKEAEELKKLGDPRALRIVELLLELVQRIVEAILAGDRELMERLLARLHEALVLLESIKRS

SEQ ID NO: 1431 - protein, 207 aa, synthetic construct
  REGION 1..207: note = Synthetic
LEQRRHVKTLITLIELIARIAGSEELKEFAREMLERLQRDTTGEDLEKLEQRVKVALLIALIILIADQAGSEELKEFAREMLERLQRDTTGEDLEKLQRRVEVALLIALIILIAHKAGSEELKEFAREMLERLQRDTTGRDLLKLYLRVFVALLIALIILIAKRAGSEELKEFAREMLERLQRDTTGDDLFKLVHLVIRALFRAREI

SEQ ID NO: 1432 - protein, 218 aa, synthetic construct
  REGION 1..218: note = Synthetic
AERIRELLRILLRRIHEAERAGDHEKSQELEQFYEAAKQVYRAIKEAEELKKLGDPRALRIVELLLELVQRIVEAILAGDFEKMQELLQFLKAATQVLRAIKEAEELKKLGDPRALRIVELLLELVQRIVEAILAGDFEKMQELLQFLKAATQVLRAIKEAEELKKLGDPRALRIVELLLELVQRIVEAILAGDFEKMEKLLQELERALVELRIILLS

SEQ ID NO: 1433 - protein, 254 aa, synthetic construct
  REGION 1..254: note = Synthetic
DEYYIHFAFHVLVLILIAFFLAQESGDPELLQRIKEVLETAKELVELFLRSTDPEEMKRLYYLAFALSVLILILIAWFLAQQSGDPELLQRIKEVLETAKELVELFKESTDPEEMKRLYYLAFALSVLILILIAWFLAQQSGDPELLQRIKEVLETAKELVELFKESTDPEEMKRLYYLAFALSVLILILIAWFLAQQSGDPELLQRIKEVLETAKELVELFKESTDPEEMKRLYELAHELFLRILTLLERFHS

SEQ ID NO: 1434 - protein, 200 aa, synthetic construct
  REGION 1..200: note = Synthetic
DKEEETLRLMIILKYILLFAELFYKRTGDPKALQLAETVKELIRLLYEALEEGDEEKLKEIKKLVETLILMFRLLEILERAVRRYQQTGDPKALQLAETVKELIRLLYEALEEGDEEKLKEIKLLVETLILMFRLLEILERAVQRYQQTGDPKALQLAETVKELIRLLYEALEEGDREKLSRIYELVNRLDALFYKLEAS

SEQ ID NO: 1435 - protein, 218 aa, synthetic construct
  REGION 1..218: note = Synthetic
LREELQRELHKLLHESLRAVEAGDEEKLRKIQELLKVIFLAYEAAEFAMQLMRQGDPLAEELLRELQKLIEQSQEAKEAGDEEKLRKINELIKVIVLAIQAAWFAMQLMRQGDPLAEELLRELQKLIEQSQEAKEAGDEEKLRKINELIKVIVLAIQAAWFAMQLMRQGDPIAERLLRELQKLIEQSQEAKEAGDEEKLREILIRILQVVYAIIYAWS

SEQ ID NO: 1436 - protein, 253 aa, synthetic construct
  REGION 1..253: note = Synthetic
DEEIVRFLIVVLYALLILELTLKRTGDDRMRELLEQLQELIERLIKYLQAGDQEEVKKFVEIAYFLAQVALAIAILLKTLRETGDDRMRELLEQLQELIERLIKYLQAGDQEEVKKFVEIAYFLAQVAIAIAELLKTLRETGDDRMRELLEQLQELIERLIKYLQAGDQEEVKKFVEIAYLLAVVAIAIAELLKTLRETGDDRMRELLEQLQELIERLIKYLQAGDQEEVEKFVNRAYLLAVYAILVAELLKS

SEQ ID NO: 1437 - protein, 253 aa, synthetic construct
  REGION 1..253: note = Synthetic
DLEIEYFERQVQEALHILRLTLRKTGDDRMRELLEQLQELIERLIKYLQAGDQEEVKKFVEIAYFLAQVAIAIAELLHTLRLTGDDRMRELLEQLQELIERLIKYLQAGDQEEVKKFVEIAYALAEVAIAIAILLLTLRQTGDDRMRELLEQLQELIERLIKYLQAGDQEEVKKFVRIAFLLAFVAIAIAELLKTLRETGDDRMRELLEQLQELIERLIKYLQAGDQEEVKKFVEEAFRLAFRALATAELLKL

SEQ ID NO: 1438 - protein, 269 aa, synthetic construct
  REGION 1..269: note = Synthetic
DELRLEVERLAIEAKRYLAQLQMAGVPEELIRQAKELLEEMIEVSRQLKEFFERGDKEYVRLLLLLAQVLLLAIKAIWYLAQLQMAGVPEELIRQAKELLEEMIEVSRQLKEFFERGDKEYVRLLLLLAQVLLLAIKAIWYLAQLQMAGVPEELIRQAKELLEEMIEVSRQLKEFFERGDKEYVRLLLLLAQVLLLAIKAIWYLAQLQMAGVPEEDIRLAKELLEEMIEVSRQLKEFFERGDERYVLRLFLTAEVLLYEIQVIWELAQS

SEQ ID NO: 1439 - protein, 269 aa, synthetic construct
  REGION 1..269: note = Synthetic
DELLIRALQLLLEIEHLIRLIKQNATDPELRKQAKELSEEAREMSRQLKEALQQGDEEKVRLYLLNIEALFLLVEIIRLILEIKQNATDPELRKQAKELSEEAREMSRQLKEALQQGDERKVRLYLLNIEALFLLVEIIRLILEIKQNATDPELRKQAKELSEEAREMSRQLKEALQQGDEEKVRLYLLNIEALFLLVEIIRLILEIKQNATDPELRKRAKRLSEEAREFSRQLKEALQQGDEERVYKALHNIRALFTLVELIRLRLES

SEQ ID NO: 1440 - protein, 269 aa, synthetic construct
  REGION 1..269: note = Synthetic
DELLEEARRLLFEIEFLIEQIKRNATDPELRKQAKELSEEAREMSRQLKEALQQGDEEKVRLYLLNIEALFLLVEIIRLILEIKQNATDPELRKQAKELSEEAREMSRQLKEALQQGDEEKVRLYLLNIEALFLLVEIIRLILEIKQNATDPELRKQAKELSEEAREMSRQLKEALQQGDEEKVRLYLLNIEALFLLVEIIRLILEIKQNATDPELRKQAKELSEEAREMSRQLKEALQQGDEKRVRQHLQIIKELFLLVELIRQKFES

SEQ ID NO: 1441 - protein, 254 aa, synthetic construct
  REGION 1..254: note = Synthetic
DEIIFEAIELVLRARYYVRRMKRKGVDVETLEEISRIATELLEQVVQAFQRGDEESLRLLLIIIRAILLVAQALWYVIEMKKKGVDVETLEEISRIATELLEQVVQAFQRGDEESLRLLLIIIRAILLVAQALWYVIEMKKKGVDVETLEEISRIATELLEQVVQAFQRGDEESLRLLLIIIRAILLVAQALWYVIEMKKKGVDVEDLEEISRIATELLEQVVQAFQRGDEESLRRLLVLIQQILHVAQVLFRL

SEQ ID NO: 1442 - protein, 167 aa, synthetic construct
  REGION 1..167: note = Synthetic
DNLETLLKQLLENLRDVLEKGDKELIILIAFILVLIARRLGDEEILKQLLKNLLELLRQMQEEGDKESIIEIAKVLVEIARELGDEEILKQLLKNLLELLRQMQEEGDKESIIEIAKVLVEIARELGDEEILKQLLKNLLELLRQMQEEGDRESLVKIREVLQQIEL

SEQ ID NO: 1443 - protein, 219 aa, synthetic construct
  REGION 1..219: note = Synthetic
DEKLLELRIVAYRAARLAEELGDPEIFEQVIQSVREAIKSFKQGDEEKMEQYLRLIRLIWWALEAARLAEELGDPEIFEQVIQSVREAIKSFKQGDEEKMEQYLRLIRLIWWALEAARLAEELGDPEIFEQVIQSVREAIKSFKQGDEEKMEQYLRLIRLIWYALEAARLAEELGDPEIFEQVIQSVREAIKSFKQGDEEKMEEYLERIYLIFYQLERS

SEQ ID NO: 1444 - protein, 214 aa, synthetic construct
  REGION 1..214: note = Synthetic
DELERTTLELLQELLRLLREGDREKARELTEQIKLIMTAVKALSLLYQALQNGEVSEELYETVRQLVEELLRLLKEGDLEKARELTEQIKLIMTAVKALSLLYQALQNGEVSEELYETVRQLVEELLRLLKEGDLEKARELTEQIKLIMTAVKALSLLYQALQNGEVSEELYETVRQLVEELLRLLKEGDLEKAYELTLKIIHILLHVEYKSKH

SEQ ID NO: 1445 - protein, 249 aa, synthetic construct
  REGION 1..249: note = Synthetic
SEELRLKITILRALLVLEEVLRQTGSPVIKNLLEQAKRLSQELIEALKRGDMEKAREIMEKVQLLLTIALALQTLFEVYRQTGSPVIKNLLEQAKRLAQELIEALKRGDMEKAREIMEKVQLLLTIALALQTLFEVYRQTGSPVIKNLLEQAKRLAQELIEALKRGDMEKAREIMEKVQLLLTIALALQTLFEVYRQTGSPKIKNLLEQAKRLAQELIEALKRGDHEKAQKIEYLVRYLLTLALEDQTL

SEQ ID NO: 1446 - protein, 249 aa, synthetic construct
  REGION 1..249: note = Synthetic
SEETELRLTILRALYTLFRVLEETGSPVIKNLLEQAKRLAQELIEALKRGDMEKAREIMEKVQLLLTIALALQTLFEVYRQTGSPVIKNLLEQAKRLAQELIEALKRGDMEKAREIMEKVQLLLTIALALQTLFEVYRQTGSPVIKNLLEQAKRLAQELIEALKRGDMEKAREIMEKVQLLLTIALALQTLFEVYRQTGSPVIKNLLEQAKRLAQELIEALKRGDMRKAEEITNLVLELLHRARLLQRH

SEQ ID NO: 1447 - protein, 204 aa, synthetic construct
  REGION 1..204: note = Synthetic
SEMERFVQKAEVLVQEAEELLSKLKQTGDPELKELVQIIFELLKQVLRILKEYAGKDERKLEMALFVAEALLIVARALLLLSKLKQTGDPELKELVQIIFELLKQVLRILKEYAGKDERKLEMALFVAEALLIVARALLLLSKLKQTGDPELKELVQIIFELLKQVLRILKEYAGKDERKLTQALLLALELLVRALQLLLKSES

SEQ ID NO: 1448 - protein, 204 aa, synthetic construct
  REGION 1..204: note = Synthetic
SEMEHFVQEAELIVRLAELVLEYLKRTGDPELKELVQIIFELLKQVLRILKEYAGKDERKLEMALFVAEALLIVALALHLLSQLKRTGDPELKELVQIIFELLKQVLRILKEYAGKDERKLRMALLVARALLIVARALLLLSKLKQTGDPELKELVQIIFELLKQVLRILKEYAGKDREKLQRALEIALQLLLLAYRLLLESEN

SEQ ID NO: 1449 - protein, 238 aa, synthetic construct
  REGION 1..238: note = Synthetic
SEQEERILRLALQLEVLARFLERITGSKEYAEEAREMAQLAREAAESGDEEKLRRYEQLLRIVFLALLLVLLAVTLEQKTGSKEYAEEAREMAQLAIEAAKSGDEEKLRRYEQLLRIVFLALLLVELAVTLEQKTGSKEYAEEAREMAQLAIEAAKSGDEEKLRRYEDLLRIVFLALLLVELAVTLEQKTGSKEYAEEAREMAQLAIEAAKSGDEEKLHHYYAVLIFLYLKLRHVERR

SEQ ID NO: 1450 - protein, 282 aa, synthetic construct
  REGION 1..282: note = Synthetic
SEERIRVHKLALEAQRLITELERYAERNGDPKLFKELYEIARFALELVKRAEQLVQSENEEDLEEAIRILEVAILALIAMLLIILLKQYAERNGDPKLFKELYEIARFALELVKRALQLVQSENEEDLEEAIRILEVAILALIAMLLIILLKQYAERNGDPKLFKELYEIARFALELVKRALQLVQSENEEDLEEAIRILEVAILALIAMLLIILLKQYAERNGDPKLFKELYEIARFALELVKRALQLVQSENEEDLEEAKRILEEAVLLLRFMLLRIRNS

SEQ ID NO: 1451 - protein, 282 aa, synthetic construct
  REGION 1..282: note = Synthetic
DEREEEVYELAAQALALILLLEWLAEYNGDPKLFKELYEIARFALELVKRAEQLVQSENEEDLEEAIRILEVAILALIAMLLIIRLKHYAEQNGDPKLFKELYEIARFALELVKRALQLVQSENEEDLEEAIRILEVAILALIAMLLIILLKQYAERNGDPKLFKELYEIARFALELVKRALQLVQSENEEDLREAILILRVAILALIAMLLIILLKQYAERNGDPKLFKELYETARFALELVKRALQLVQSENHEDLYEALRILHEAIIRLRLSLERILNS

SEQ ID NO: 1452 - protein, 282 aa, synthetic construct
  REGION 1..282: note = Synthetic
SEREIRVRELAHKAELLIELLKHLAEENGDPKLFKELYEIARFALELVKRALQLVQSENEEDLEEAIRILEVAILALIAMFLIIKLKQYAERNGDPKLFKELYEIARFALELVKRALQLVQSENEEDLEEAIRILEVAILALIAMLLIILLKQYAERNGDPKLFKELYEIARFALELVKRALQLVQSENHEDLEEAIRILEVAILALIAMLLIILLKQYAERNGDPKLFKELYEIARFALELVKRALQLVQSENKEDLIEALLILTEAIHKLIEMLEIILRK

SEQ ID NO: 1453 - protein, 254 aa, synthetic construct
  REGION 1..254: note = Synthetic
LERIRRLLERVRSLIIQLKELAQQQGDEEMKELVELILQIVLKAIRLVKQGKDLEEAETLARIALLLLEVALLIIELKRLAQRQGDEEMKELVELILQIVLKAIRLVKQGKDLEEAETLARIALLLLEVALLIIHLKRLAQQQGDEEMKELVELILQIVLKAIRLVKQGKDLREAELLAEIALLLLEVALLIIELKRLAQQQGDEEMKELVELILQIVLKAIRLVKQGKDLDEAYRLALEALVLLRVALLQIES

SEQ ID NO: 1454 - protein, 167 aa, synthetic construct
  REGION 1..167: note = Synthetic
DYLELLLRLLLELLRRAQEEGDKESIIEIAKRLVETARQLGDEEILKQLLKNLLELLRQMQEEGDKESIIEIAKVLVEIARELGDEEILKQLLKNLLELLRQMQEEGDKESIIEIAKVLVEIARELGDEEILKQLLKNLLELLRQMQEEGDEHSLIDILKVLTLIKS

SEQ ID NO: 1455 - protein, 255 aa, synthetic construct
  REGION 1..255: note = Synthetic
SEELRKLETEIRSIAYLVELLAREAGDPELIRIAQEVLEYLSEILKKVRESTDEEQMRRLLELALLIVLIAYIAALVFILAKQAGDPELIRIAQEVLEYLSEILKKVRESTDEEQMRRLLELALLIVLIAYIAALVFILAKQAGDPELIRIAQEVLEYLSEILKKVRESTDEEQMRRLLELALLIVLIAYIAALVFILAKQAGDPELIRIAQEVLEYLSEILKKVRESTDEEQMRRLLYQALIIVLRAYIYAREL

SEQ ID NO: 1456 - protein, 255 aa, synthetic construct
  REGION 1..255: note = Synthetic
LEELRELEFRIRAIALAVRFLAEAAGDPELIRIAQEVLEYLSEILKKVRESTDEEQMRRLLELALLIVLIAYIAAEVFLLAQRAGDPELIRIAQEVLEYLSEILKKVRESTDEEQMRRLLELALLIVLIAYIAALVFILAKQAGDPELIRIAQEVLEYLSEILKKVRESTDEEQMRRLLELALLIVEIAYIAALVFILAKQAGDPELIRIAQEVLEYLSEILKKVRESTDEEQMRRLLYEALELVSRAYTYARLL

SEQ ID NO: 1457 - protein, 199 aa, synthetic construct
  REGION 1..199: note = Synthetic
DELLEEALRLLRILKELWERYGDENAFEVLRLMQEALERGDKESLKEVLLLAKAVILLQKLLELWERYGDENAFEVLRLMQEAIQRGDKESLKEVLLLAKAVILLQKLLELWERYGDENAFEVLRLMQEAIQRGDKESLKEVLLLAKAVILLQKLLELWERYGDEHARHVLRFMQRAIQRGDKHELKLVLDLAEVVIKH

SEQ ID NO: 1458 - protein, 199 aa, synthetic construct
  REGION 1..199: note = Synthetic
DELEYEARKLLRKLLELWERYGDENAFEVLRLMQEAIQRGDKESLKEVLLLAKAVILLQKLLELWERYGDENAFEVLRLMQEAIQRGDKESLKEVLLLAKAVILLQKLLELWERYGDENAFEVLRLMQEAIQRGDKESLKEVLLLAKAVILLQKLLELWERYGDENAHLVLRLMQIAIQRGDKLLLRAVLHAALIVLRS

SEQ ID NO: 1459 - protein, 249 aa, synthetic construct
  REGION 1..249: note = Synthetic
SDIEEELRYLVVEAEHLIRKLLKSSNPELQEIAQQAIEELKEMLERAKRVSEEELKRILIFVILLLLVLKALELIRKLLKSSNPELQEIAQQAIEELKEMLERAKRVSEEELKRILIFVILLLLVLKALELIRKLLKSSNPELQEIAQQAIEELKEMLERAKRVSEEELKRILIFVILLLLVLKALELIRKLLKSSNPELQEFAQQAIEELKEMLERAKRVSEEQLEEILTIVEYILRFLEVLENRLKS

SEQ ID NO: 1460 - protein, 262 aa, synthetic construct
  REGION 1..262: note = Synthetic
DELEQKVQKFRASLEFILEKLKELVEKYGDPEAREILELAKRAMEFLSRVLQLGDEEKLKLALLIAQVVEYIFRLWEELQELKELVEKYGDPEAREILELAKRAMEFLSRVIQLGDEEKLKLALLIAQVVLYIFRLWQELQELKELVEKYGDPEAREILELAKRAMEFLSRVIQLGDEEKLKLALLIAQVVLYIFRLWQELQELKELVEKYGDPEAREILELAKRAMEFLSRVIQLGDEQKLRHALYIARIVLLDFKRWQTS

SEQ ID NO: 1461 - protein, 262 aa, synthetic construct
  REGION 1..262: note = Synthetic
DQLIEQVKRYIYLLWEIKVHLEFLVRHYGDPEAREILELAKRAMEFLSRVIQLGDEEKLKLALLIAQVVLYIFRLWRELRELKELVEKYGDPEAREILELAKRAMEFLSRVIQLGDEEKLKLALLIAQVVLYIFRLWQELRELKELVEKYGDPEAREILELAKRAMEFLSRVIQLGDEEKLKLALLIAQVVLYIFRLWQELQELKELVEKYGDPEAREILELAKRAMEFLSRVIQLGDERKLREALLIAQRVLLIFREFKHS

SEQ ID NO: 1462 - protein, 201 aa, synthetic construct
  REGION 1..201: note = Synthetic
DEEETEALELATRLRLIAKQAEEYYEKTGDPTYQEISEVAKQIVREILQAVKRGDEESIRKLQEMAEAVLLAFELSEIARLAEEYYEKTGDPTYQEISEVAKQIVREILQAVKRGDEESIRKLQEMAEAVLLAFELSEIARLAEEYYEKTGDPTYQEISEVAKQIVREILQAVKRGDEHRIRRLFILALILLLIFELSRHE

SEQ ID NO: 1463 - protein, 201 aa, synthetic construct
  REGION 1..201: note = Synthetic
DKEEQEARELAFLLRIIAEQAEEYYEKTGDPTYQEISEVAKQIVREILQAVKRGDEESIRKLQEMAEAVLLAFELSEIARLAEEYYEKTGDPTYQEISEVAKQIVREILQAVKRGDEESIRKLQEMAEAVLLAFELSEIARLAEEYYEKTGDPTYQEISEVAKQIVREILQAVKRGDEHRIRRLYLLALRLLTEFHLSRLS

SEQ ID NO: 1464 - protein, 202 aa, synthetic construct
  REGION 1..202: note = Synthetic
DFEEILKVFEQILRELQQARKRGDEESIRKLQEMLEAVQLAFHLSEIAQLAEEYYEKTGDPTYQEISEVAKQIVREILQAVKRGDEESIRKLQEMAEAVLLAFELSEIARLAEEYYEKTGDPTYQEISEVAKQIVREILQAVKRGDEESIRKLQEMAELVLEAFELSERARLAEEKYEKHGDPRYQEYSELAKQLVRLILEL

SEQ ID NO: 1465 - protein, 167 aa, synthetic construct
  REGION 1..167: note = Synthetic
DLLKKLLEDLLRNLREVLRRGDKHLIIQTARQLVHIARLLGDEEILKQLLKNLLELLRQMQEEGDKESIIEIAKVLVEIARELGDEEILKQLLKNLLELLRQMQEEGDKESIIEIAKVLVEIARELGDEEILKQLLKNLLELFRQMQEEGDDESLALILYVLVLIRS

SEQ ID NO: 1466 - protein, 202 aa, synthetic construct
  REGION 1..202: note = Synthetic
TLEEIQRVLEQILRELFEAQRRGDEESYRKLQEMAEAVRLAHELYEIARLAEEYYEKTGDPTYQEISEVAKQIVREILQAVKRGDEESIRKLQEMAEAVLLAFELSEIARLAEEYYEKTGDPTYQEISEVAKQIVREILQAVKRGDEESIRKLQEMAEAVLLAFELSEIARLAEEYYEKTGDPRYQLTSELAKLIVELILES

SEQ ID NO: 1467 - protein, 262 aa, synthetic construct
  REGION 1..262: note = Synthetic
DEDEERIHQQLSELLRIIHRAKEITRETGDPLARKLMEQAKRVYELAKQALKTGDEELLRQLQESVEIVRQLYELLEIIEKAKQITRETGDPLARKLMEQAKRVFELALQALKTGDEELLRQLQESVEIVRQLYELLEIIEKAKQITRETGDPLARKLMEQAKRVFELALQALKTGDEELLRQLQESVEIVRQLYELLEIIEKAKQITRETGDPLARKLMEQAKRVFELALQALKTGDEELLRRLRLEVRQVRLIYERLEHL

SEQ ID NO: 1468 - protein, 262 aa, synthetic construct
  REGION 1..262: note = Synthetic
DQEEREIHEQRLELLHIILEAKKITRETGDPLARKLMEQAKRVFELALQALKTGDEELLRQLQESVEIVRQLYELLEIIEKAKQITRETGDPLARKLMEQAKRVFELALQALKTGDEELLRQLQESVEIVRQLYELLEIIEKAKQITRETGDPLARKLMEQAKRVFELALQALKTGDEELLRQLQESVEIVRQLYELLEIIEKAKQITRETGDPLARKLMEQAKRVFELALQALKTGDDELLTELRIQVLRVRLRYEELEKS

SEQ ID NO: 1469 - protein, 284 aa, synthetic construct
  REGION 1..284: note = Synthetic
DEREEQKLIVLHFLILIHRALLLVRELKKKAGDETAQELIEELKELVELVKELLRSYRQYGDEEAKEKMRQITEVAKFLLLIILALLLVYELKQKAGDETAQELIEELKELVELVKELLRSYRQYGDEEAKEKMRQITEVAKFLLLIILALLLVYELKQKAGDETAQELIEELKELVELVKELLRSYRQYGDEEAKEKMRQITEVAKFLLLIILALLLVYELKQKAGDETAQELIEELKELVELVKELLRSYRQYGDREAKNIMIEITLKAYFLLKSIEQLLKS

SEQ ID NO: 1470 - protein, 284 aa, synthetic construct
  REGION 1..284: note = Synthetic
DEKEHQEELVLHFLRLIRLALLLVYELKQKAGDETAQELIEELKELVELVKELLRSYRQYGDEEAKEKMRQITEVAKFLLLIILALLLVYELKQKAGDETAQELIEELKELVELVKELLRSYRQYGDEEAKEKMRQITEVAKFLLLIILALLLVYELKQKAGDETAQELIEELKELVELVKELLRSYRQYGDEEAKEKMRQITEVAKFLLLIILALLLVYELKQKAGDERAQELIEELKELVELVKELLRSYRQYGDREAKYLMLIITSQAESLLNTIRILLHL

SEQ ID NO: 1471 - protein, 265 aa, synthetic construct
  REGION 1..265: note = Synthetic
DKLLETFYELFRLLNEVYVLALFIYLLFGDPTARLALELASENLKQVREMLRAGDEEQFEQVKRLITFAKLLLLLLLVILLASRIFERFGDPTARLALELASENIKQVLEMTRAGDEEQFEQVKRLITFAKLLLLLLLVILLASRIFERFGDPTARLALELASENIKQVLEMTRAGDEEQFEQVKRLITFAKLLLLLLLVILLASRIFERFGDPTARLALELASENIKQVLEMTRAGDERQHQRVLELIAEATSILIRLEALLES

SEQ ID NO: 1472 - protein, 268 aa, synthetic construct
  REGION 1..268: note = Synthetic
SETEELTLRIKLLIQLAELIARLTGDPLAQELVELMIELLKQAVERTERLEKNGNLEEAQETLKTVYLTILIILLIVEALQIARETGDPLAQELVELMIELLKQAVERTERLEKNGNLEEAQETLKTVYLTILIILLIVEALQIARQTGDPLAQELVELMIELLKQAVERTERLEKNGNLEEAQETLRTVYLTILIILLIVEALQIARQTGDPLAQELVELMIELLKQAVERTERLEKNGNLEEAQRTLFEVYVEIERILEIVEHLQS

SEQ ID NO: 1473 - protein, 253 aa, synthetic construct
  REGION 1..253: note = Synthetic
DDLELLSVEIHLLIEFVTLLAKRLGDPQLLEIAQKMLELLLEVERYQEAGDEEKVRKLLELALLSALIAYLIAYVTLLAHRLGDPQLLEIAQKMLELLLEVLRYQEAGDEEKVRKLLHLALLSALIAYLIAYVTRLAKELGDPQLLEIAQKMLELLLEVLRYQEAGDEEKVRKLLRLALLSARIAYLIAYVTRLAKELGDPQLLEIAQKMLELLLEVLRYQEAGDEEKVRKLLEKALRLAAQAFYIAELTRQS

SEQ ID NO: 1474 - protein, 256 aa, synthetic construct
  REGION 1..256: note = Synthetic
SDELKFLELLLRVYYLVTRVELIARETGDEKLLEIMRQVLEQLLQAFEIFQAGDKEKARETIQFLLLLALVAWLVAEVSRIAKETGDEKLLEIMRQVLEQLLQAFEIFQAGDKEKARETIQFLLLLALVAWLVAEVSRIAKETGDEKLLEIMRQVLEQLLQAFEIFQAGDKEKARETIQFLLYLARVAWLVAEVSRIAKETGDEKLLEIMRQVLEQLLQAFEIFQAGDKEKAEETIRRLLELALHAFFQAEEIRIS

SEQ ID NO: 1475 - protein, 256 aa, synthetic construct
  REGION 1..256: note = Synthetic
DEEYRFLQLLLEVLYLVLQVELIARHTGDEKLLEIMRQVLEQLLQAFEIFQAGDKEKARETIQFLLLLALVAWLVAEVSRIAKETGDEKLLEIMRQVLEQLLQAFEIFQAGDKEKARETIQFLLLLALVAWLVAEVSRIAKETGDEKLLEIMRQVLEQLLQAFEIFQAGDKEKARETIQFLLLLARVAWLVAEVSRIAKETGDEKLLEIMRQVLEQLLQAFEIFQAGDKEKARETIKELIRRALHAFSLAELVRES

SEQ ID NO: 1476 - protein, 187 aa, synthetic construct
  REGION 1..187: note = Synthetic
QREAETLFDAVRAAIELGDKELIKRLWEIARQIFEEARELGDPQILATVLLVMVLIAYSAGDKEKIKELWEKARQIFEEARELGDPQILATVLLVMVLIAYSAGDKEKIKELWEKARQIFEEARELGDPQILATVLLVMVLIAYSAGDKEKIHELYEKAQQIFREAYELGDPRILETVLRVLHLISS

SEQ ID NO: 1477 - protein, 256 aa, synthetic construct
  REGION 1..256: note = Synthetic
SETEHFKHLLNRVQILVLTVETIARNTGDEKLLEIMRQVLEQLLQAFEIFQAGDKEKARETIQFLLLLALVAYLVAEVSYIAKFTGDEKLLEIMRQVLEQLLQAFEIFQAGDKEKARETIQFLLRLARVAWLVAEVSRIAKETGDEKLLEIMRQVLEQLLQAFEIFQAGDKEKARETIEFLLRLALVAWLVAEVSRIAKETGDEKLLEIMRQVLEQLLQAFEIFQAGDKEKAHETIHFLLQLAARAYILAEESRLS

SEQ ID NO: 1478 - protein, 250 aa, synthetic construct
  REGION 1..250: note = Synthetic
DEEAIELISRALKLLRELLQTLREANSEEVKEAIEIIRRLIEEATEAFQRGDLEKLLKVLKAIVLMIEALRLLQQLLQTLREANSEEVKEAIEIIRRLIEEATEAFQRGDLEKLLKVLKAIVLMIEALRLLQQLLQTLREANSEEVKEAIEIIRRLIEEATEAFQRGDLEKLLKVLKAIVLMIEALRLLQQLLQTLREANSENVETAIEYIRRLIERATEAFQRGDLEFLLRLLRLIVQIIRVLLEITRL

SEQ ID NO: 1479 - protein, 250 aa, synthetic construct
  REGION 1..250: note = Synthetic
DEKAYELMQEARHLLFRLRRTLEEANSEEVKEAIEIIRRLIEEATEAFQRGDLEKLLKVLKAIVLMIEALRLLQQLLQTLREANSEEVKEAIEIIRRLIEEATEAFQRGDLEKLLKVLKAIVLMIEALRLLQQLLQTLREANSEEVKEAIEIIRRLIEEATEAFQRGDLEKLLKVLKAIVLMIEALRLLQQLLQTLREANSEHVRLAIEIIRLLIEEATEAFQRGDLEFLERLLRSIVELIRSLLKRVES

SEQ ID NO: 1480 - protein, 250 aa, synthetic construct
  REGION 1..250: note = Synthetic
DEKAHELILRAETLLKRLEFTLEKANSEEVKEAIEIIRRLIEEATEAFQRGDLEKLLKVLKAIVLMIEALRLLQQLLQTLREANSEEVKEAIEIIRRLIEEATEAFQRGDLEKLLKVLKAIVLMIEALRLLQQLLQTLREANSEEVKEAIEIIRRLIEEATEAFQRGDLEKLLKVLKAIVLMIEALRLLQQLLQTLREANSEQVKEAIEIIRRHIEEATEAFQRGDLEKLISLLRLIVLLIRLLLQLVES

SEQ ID NO: 1481 - protein, 249 aa, synthetic construct
  REGION 1..249: note = Synthetic
DEIRFEVELILTQIKRTVKKLEEQGLAETARQFKETAQRIYELVKKAQESGDEETLERALRMAQVLLLLLRIFETVKKLEEQGLAETARQFKETAQRIYELVKKAQESGDEETLERALRMAQVLLLLLRIFETVKKLEEQGLAETARQFKETAQRIYELVKKAQESGDEETLERALRMAQVLLLLLRIFETVKKLEEQGLAEVARQFKETAQRIYELVKKAQESGDRRLLTEALFLARLLLTLLELFES

SEQ ID NO: 1482 - protein, 206 aa, synthetic construct
  REGION 1..206: note = Synthetic
DLDLARVYLALLQAFHFMKAAGDEELREIVQRAKELIEQYEETGDPKYILNALVLLSLALAFFFMKAAGDEELREIVQRAKELIEQYEETGDPKYILNALVLLSLALAFFFMKAAGDEELREIVQRAKELIEQYEETGDPKYILNALVLLSLALAFFFMKAAGDEFLKFIVQLAKELIELYEETGDPKYIDLALLLLLLAIAYFFS

SEQ ID NO: 1483 - protein, 234 aa, synthetic construct
  REGION 1..234: note = Synthetic
DRLEQLLLRIQELLLLIREFFRKIPTEEAQEVLELAKQILEIAWRASANGDEETVRLMLLLAQIIYLLLQIFEFFKKIPTEEAQEVLELAKQILEIAWRASANGDEETVRLMLLLAQIIYLLLQIFEFFKKIPTEEAQEVLELAKQILEIAWRASANGDEETVRLMLLLAQIIYLLLQIFEFFKKIPTEEAQEVLELAKQILEIAWRASANGDEKLVRLMLLRAELLLLQLEYL

SEQ ID NO: 1484 - protein, 234 aa, synthetic construct
  REGION 1..234: note = Synthetic
DELRRLLLRIEELLISIEQFFRKIPTEEAQEVLELAKQILEIAWRASANGDEETVRLMLLLAQIIYLLLQIFEFFKKIPTEEAQEVLELAKQILEIAWRASANGDEETVRLMLLLAQIIYLLLQIFEFFKKIPTEEAQEVLELAKQILEIAWRASANGDEETVRLMLLLAQIIYLLLQIFEFFKKIPTEEAQEVLELAKQILEIAWRASANGDHLLVEEALTLAESLRKRLQHF

SEQ ID NO: 1485 - protein, 266 aa, synthetic construct
  REGION 1..266: note = Synthetic
DELLVEVRSLLIRIERIMEYIERTAEDPRYAQEVREIVQKAKEAIQRIEELLRNGDEEEAKILALLVRVLALLASIILLMLIIERTAEDPRYAQEVREIVQKAKEAIQRIEELFKNGDEEEAKILALLVRVLWLLASIILLMLIIERTAEDPRYAQEVREIVQKAKEAIQRIEELFKNGDEEEAEILALLVRVLWLLASIILLMLIIERTAEDPRKAQKVREIVQKAKEAIQRIEELFKNGDREEALELAFLVYILWLLASEILLS

SEQ ID NO: 1486 - protein, 253 aa, synthetic construct
  REGION 1..253: note = Synthetic
DQVEHIAQEIETIITEIRILLDRLRKRGNPEQAEKMERLAEEVQQFAKEALELGDLETLQVALIAIQIILIIVRILEFLERLKKRGNPEQAEKMERLAEEVQQFAKEALELGDLETLQVALIAIQIILIIVRILEFLERLKKRGNPEQAEKMERLAEEVQQFAKEALELGDLETLQVALIAIQIILIIVRILEFLERLKKRGNPEQAEKMERLAEEVQQFAKEALELGDLHLLRRALLLILIILLLVELFLLN

SEQ ID NO: 1487 - protein, 222 aa, synthetic construct
  REGION 1..222: note = Synthetic
SEQEEWVNRVEELIFAAYLIAKQLGNEEISEIAQQLLEELKRALKASSFEEVRQLWYVAQVMLLIARAYFVAKELGNEEISEIAQQLLEELKRALKASSFREVIFLFYVAQVMLLIAQAYRTAKKLGNEEISEIAQQLLEELKRALKASSFEEVLQLYLVAQVMLLIAKAYETAKRLGNEEISEIAQQLLEELKRALKASSFREVQQLILLAREMLSRAESY

SEQ ID NO: 1488 - protein, 253 aa, synthetic construct
  REGION 1..253: note = Synthetic
DRLEIIAIRIEHIILEIREFLKRLKKRGNPEQAEKMERLAEEVQQFAKEALELGDLETLQVALIAIQIILIIVRILEFLERLKKRGNPEQAEKMERLAEEVQQFAKEALELGDLETLQVALIAIQIILIIVRILEFLERLKKRGNPEQAEKMERLAEEVQQFAKEALELGDLETLQVALIAIQIILIIVRILEFLERLKKRGNPEQAEKMERLAEEVQQFAKEALELGDLELLHRALRRIEEILEHVRQLEES

SEQ ID NO: 1489 - protein, 253 aa, synthetic construct
  REGION 1..253: note = Synthetic
SEVERIALEIKYIIQEIEEFLERLKKRGNPEQAEKMERLAEEVQQFAKEALELGDLETLQVALIAIQIILIIVRILEFLERLKKRGNPEQAEKMERLAEEVQQFAKEALELGDLETLQVALIAIQIILIIVRILEFLERLKKRGNPEQAEKMERLAEEVQQFAKEALELGDLETLQVALIAIQIILIIVRILEFLERLKKRGNPEQAEKMERLAEEVQQIAKEALELGDLELLRFALEDIRAILLIVRSLLFH

SEQ ID NO: 1490 - protein, 235 aa, synthetic construct
  REGION 1..235: note = Synthetic
LEFLKEVRQLIQVFFYSIERLAQEIDPEELQRLRELAKKAIETVEEALRRGDETLAFLALVLILIIYYYAQIWIMAQRIDPEELQRLRELAKKAIETVEEALRRGDETLAYLALVLILIIYYYAQIWLLAQRIDPEELQRLRELAKKAIETVEEALRRGDERLAFLALVLILIIYYYAQIWEMAQRIDPEDLQRLRELAKKAIETVEEALRRGDLELALRALSLILFIFLLARLL

SEQ ID NO: 1491 - protein, 256 aa, synthetic construct
  REGION 1..256: note = Synthetic
SHFMKLLELIKEIFFRVKLLAERIKEQGDEEAYEEAREAAQKIKELFEEVKRSGDLETAHFMTLLAQILLIYITVLFLAYQIKKQGDEEAYEEAREAAQKIKELFEEVKRSGDLETAQFMTLLAQILLIYITVLFLAYQIKKQGDEEAYEEAREAAQKIKELFEEVKRSGDLETARFMTLLAQILLIYITVLFLAYRIKQYGDEEAYEEAREAAQKIKELFEEVKRSGDLETAERMTNEALVLLFRIELLFETYLS

SEQ ID NO: 1492 - protein, 256 aa, synthetic construct
  REGION 1..256: note = Synthetic
SEFDELLLIILYIFYQVRFLAERIKKQGDEEAYEEAREAAQKIKELFEEVKRSGDLETAQFMTLLAQILLIYITVLFLAYQIKKQGDEEAYEEAREAAQKIKELFEEVKRSGDLETAQFMTLLAQILLIYITVLFLAYQIKKQGDEEAYEEAREAAQKIKELFEEVKRSGDLETAEFMTLLAQILLIYITVLFLAYQIKKQGDEEAYELAREAAQKIKELFEEVKRSGDVLFAYRLTLEALVLLLYIRRVFKEYQI

SEQ ID NO: 1493 - protein, 256 aa, synthetic construct
  REGION 1..256: note = Synthetic
DRFMYLLELIRRIFVLVLQLALEIKLEGDEEAYEEAREAAQKIRELFEEVKRSGDLETAQFMTLLALILLIYITVLFLAYQIKKQGDEEAYEEAREAAQKIKELFEEVKRSGDLETAQFMTLLAQILLIYITVLFLAYQIKKQGDEEAYEEAREAAQKIKELFEEVKRSGDLETAQFMTLLAQILLIYITVLFLAYQIKRLGDEEAYEEAREAAQKIKELFEEVKRSGDLETAKEMTTEALRLLHQIEVRFRSYRS

SEQ ID NO: 1494 - protein, 254 aa, synthetic construct
  REGION 1..254: note = Synthetic
SDKVRELAIQIRLMFEKAVRQAQEISQQGSQEDFEKAQRLLEEVLRTVKEALETGDEESAKVASLAAFIILMFLEAVKQAQEISQQGSQEDFEKAQRLLEEVLRTVKEALETGDEESAKVASLAAFIILMFLEAVKQAQEISQQGSQEDFEKAQRLLEEVLRTVKEALETGDEESAKVASLAAFIILLFLEAVKQAQEISQQGSQEDFEKAQRLLEEVLRIVKEALETGDEQSAKYAFHAAQLIVAFLELVKHS

SEQ ID NO: 1495 - protein, 254 aa, synthetic construct
  REGION 1..254: note = Synthetic
SEKVERLAIEIRSLFEKAHHIAREISQQGSQEDFEKAQRLLEEVLRTVKEALETGDEESAKVASLAAFIILMFLEAVKQAQEISQQGSQEDFEKAQRLLEEVLRTVKEALETGDEESAKVASLAAFIILMFLEAVKQAQEISQQGSQEDFEKAQRLLEEVLRTVKEALETGDEESAKVASLAAFIILMFLEAVKQAQEISQQGSQEDFEKAQRLLEEVLRRVKEALETGDERLAHYASLAAKLILLFLQLVKLD

SEQ ID NO: 1496 - protein, 261 aa, synthetic construct
  REGION 1..261: note = Synthetic
DELELDLEKAKLFARRAALLALEILMKATSPEIKQIVKELIRLIQKIVERAERATDEEEIKLMILLILAIATAVLAALLALEILMKATSPEIKQIVKELIRLIQKIVERAERATDEEEIKLMILLILAIATAVLAALLALEILMKATSPEIKQIVKELIRLIQKIVERAERATDEEEIKLMILLILAIATAVLAALLALEILMKATSPEIKQIVKELIRLIQKIVERAERATDEEEIFHMIRLILQLAFHVRTVLEELERS

SEQ ID NO: 1497 - protein, 261 aa, synthetic construct
  REGION 1..261: note = Synthetic
DELRIRLEHAQRLAERAALLALEILMKATSPEIKQIVKELIRLIQKIVERAERATDEEEIKLMILLILAIATAVLAALLALEILMKATSPEIKQIVKELIRLIQKIVERAERATDEEEIKLMILLILAIATAVLAALLALEILMKATSPEIKQIVKELIRLIQKIVERAERATDEKEIRLMIDLILAIATAVLAALLALEILMKATSPEIKQIVKELIRLIQKIVERAERATDEREISRMILLILTLAYEVLEELERLEEL

SEQ ID NO: 1498 - protein, 222 aa, synthetic construct
  REGION 1..222: note = Synthetic
DRQEHWVQQVQHLILQALLIAEYLGNEEISEIAQQLLEELKRAKKASSFEEVRQLWWVAQVMLLIAKAYETAKKLGNEEISEIAQQLLEELKRALKASSFEEVRQLWWVAQVMLLIAKAYETAKRLGNEEISEIAQQLLEELKRALKASSFEEVRQLWYVALVMLLIAKAYETAKRLGNEEISEIAQQLLEELKRALKASSFEEVRELIRLALEMLVRAEVS

SEQ ID NO: 1499 - protein, 241 aa, synthetic construct
  REGION 1..241: note = Synthetic
SEREQLIDELKQFSVAAEASIRNMGDEELFRQIKEIAQKARESAEKALELGDEELIRMALLIVQLLYYSVSALSIILIMGDEELFRQIKEIAQKAIESATKALELGDEELIEMALLIVQLLWYSVSALLIILQMGDEELFRQIKEIAQKAIESATKALELGDRQLIIRALLIVRLLWFSVSALSIIKKMGDEELFRQIKEIAQKAIESATKALELGDLQLIIEALLIVIRLFYHVHLQHLS

SEQ ID NO: 1500 - protein, 241 aa, synthetic construct
  REGION 1..241: note = Synthetic
DRREELIHELKLFSRLAEQIIRLMGDEELFRQIKEIAQKAIESATKALELGDEELIRMALLIVQLLYYSVSALSIIKKMGDEELFRQIKEIAQKAIESATKALELGDRRLILMALLIVQLLWYSVSALSIIKKMGDEELFRQIKEIAQKAIESATKALELGDHELIIMALAIVQLLWYSVSALSIIKKMGDEELFRQIKEIAQKAIESATKALELGDLELILRALFEVTFLFLLVHLRSLS

SEQ ID NO: 1501 - protein, 241 aa, synthetic construct
  REGION 1..241: note = Synthetic
DRMEELILELRVFSELAERIIEQMGDEELFRQIKEIAQKAIESATKALELGDEELIRMALLIVQLLWYSVSALFIIKRMGDEELFRQIKEIAQKAIESATKALELGDEELIEMALLIVQLLWYSVSALSIIKKMGDEELFRQIKEIAQKAIESATKALELGDRELIYMALLIVILLWYSVSALSIIKKMGDEELFRQIKEIAQKAIESATKALELGDHHLIIEALSLVIKLFYYVRALLEL

SEQ ID NO: 1502 - protein, 241 aa, synthetic construct
  REGION 1..241: note = Synthetic
DEREQLIYELEVFSRQARSIIKKMGDEELFRQIKEIAQKAIESATKALELGDEELIRMALLIVQLLFYSVSALSIIKKMGDEELFRQIKEIAQKAIESATKALELGDEELIRMALLIVQLLWYSVSALSIIKKMGDEELFRQIKEIAQKAIESATKALELGDEHLILMALLIVQLLWYSVSALSIIKKMGDEELFRQIKEIAQKAIESATKALELGDYELILRALALVIYLFFLVSYLSKN

SEQ ID NO: 1503 - protein, 240 aa, synthetic construct
  REGION 1..240: note = Synthetic
DEFEIIIERIKIIMREAEKIAQEAGDPELFERIKKSAQKVLESALRALELGDMESLEFAWWIVQILLIMVLALLIAQEAGDPELFERIKKSAQKVLESALRALELGDMESLEFAWWIVQILLIMVLALLIAQEAGDPELFERIKKSAQKVLESALRALELGDMESLEFAWIIVQILLIMVLALLIAQEAGDPELFERIKKSAQKVLESALRALELGDFESLLRAYNIVHELLKHVRLRLR

SEQ ID NO: 1504 - protein, 233 aa, synthetic construct
  REGION 1..233: note = Synthetic
DFEFLINKIEILVSLAEFVARYLSPEIFEQVREIAQKILESAKKALQLGDMELLLFALLIVRILVYMVLALFYALQLSPEIFEQVREIAQKILESAKKALQLGDMELLLFALLIVRILLYMVQALYLALRLSPEIFEQVREIAQKILESAKKALQLGDMELLFFALLIVRILLYMVQALLLARNLSPEIFEQVREIAQKILESAKKALQLGDRELLLRALKLVFELLLRVESL

SEQ ID NO: 1505 - protein, 233 aa, synthetic construct
  REGION 1..233: note = Synthetic
LFEELITEIEILVYIAEVLARHLSPEIFEQVREIAQKILESAKKALQLGDMELLLFALLIVRILVYMVQALLLARNLSPEIFEQVREIAQKILESAKKALQLGDMELLLFALLIVRILLYMVQALLLARNLSPEIFEQVREIAQKILESAKKALQLGDMELLLFALLIVRILLIMVQALLLARNLSPEIFEQVREIAQKILESAKKALQLGDMELLREALYLVLELLIKVERL

SEQ ID NO: 1506 - protein, 233 aa, synthetic construct
  REGION 1..233: note = Synthetic
LFEELIEEIEHLMRLALNLARRLSPEIFEQVREIAQKILESAKKALQLGDMELLLFALLIVRILLYMVQALLLARNLSPEIFEQVREIAQKILESAKKALQLGDMELLLFALLIVRILLYMVQALLLARNLSPEIFEQVREIAQKILESAKKALQLGDKQLLLFALHIVLILLYMVQALLLARNLSPEIFEQVREIAQKILESAKKALQLGDQELLLRALSLVYELLIRVHLL

SEQ ID NO: 1507 - protein, 239 aa, synthetic construct
  REGION 1..239: note = Synthetic
DLELEIVALIYLIYLQISHFARKYLSEEEIQELTELAREILEKVKEALQRGDLETLLIALIVALILLIYVIISSIARKYLSEEEIQELTELAREILEKVKEAMQRGDLETLLIALIVALILQIYVIISSIARKYLSEEEIQELTELAREILEKVKEAMQRGDLETLRIALIVALILQIYVIISSIARKYLSEEQIQELTELAREILEKVKEAMQRGDRETLIEALVLALSLLTFVRLFS

SEQ ID NO: 1508 - protein, 252 aa, synthetic construct
  REGION 1..252: note = Synthetic
LEREELINIFRELFERIKELLERIERMGDEEEVKKALESVQQAFETMQRAFEEGDERLLERAILILIFILLFLIIKELLEKIERMGDEEEVKKALESVQQAFETMQRAFEEGDERLLHRAILILIFILLFLIIKELLEKIERMGDEEEVKKALESVQQAFETMQRAFEEGDKRLLIRAILILIFILLFLIIKELLEKIERMGDEEEVKEALESVQQAFETMQRAFEEGDYRLLYKALLILELILRLLEHKES

SEQ ID NO: 1509 - protein, 207 aa, synthetic construct
  REGION 1..207: note = Synthetic
SQLELQVHLILLEIETIARDTGDETALQMAKELLERLKKATSAEEIKELLLQALVLLILVRIYETAQETGDETALQMAKELLERLKKATSAEEIKELLLQALVLLILVRIYKTAQETGDETALQMAKELLERLKKATSAEEIRLLLLQALVLLILVRIYKTAQETGDETALQMAKELLERLKKATSYEEILQLLVEALRLLYRVEKY

SEQ ID NO: 1510 - protein, 252 aa, synthetic construct
  REGION 1..252: note = Synthetic
DEREELRNEFYQLFRRIEYFLELIERMGDEEEVKKALESVQQAFETMQRAFEEGDERLLERAILILIFILLFLRIKLLLELIERMGDEEEVKKALESVQQAFETMQRAFEEGDERLLRRAILILIFILLFLIIKRLLEKIERMGDEEEVKKALESVQQAFETMQRAFEEGDQRLLLIAINILEFILLFLIIKELLEKIERMGDEEKVKEALESVQQAFETMQRAFEEGDYRLLLHALSILLQILRFLEFLES

SEQ ID NO: 1511 - protein, 252 aa, synthetic construct
  REGION 1..252: note = Synthetic
DEREELLREFRRLFHEIELFLETIERMGDEEEVKKALESVQQAFETMQRAFEEGDERLLERAILILIFILLFLRIKILLERIERMGDEEEVKKALESVQQAFETMQRAFEEGDERLLERAILILIFILLFLIIKELLEKIERMGDEEEVKKALESVQQAFETMQRAFEEGDERLLKRAILILIFILLFLIIKELLEKIERMGDEEEVKKALESVQQAFETMQRAFEEGDKRLLYEALLILHRILLFLRALES

SEQ ID NO: 1512 - protein, 232 aa, synthetic construct
  REGION 1..232: note = Synthetic
DEIERQLIEELLKLLKLSLRADGEELEEILERLKIIELLIRLALLAVQALEMAKRADDPELIEILRQLVQEAVKLIQKSRRADGEELEEILERLKIISLLIRLALLAVQALEMAKRADDPELIEILRQLVQEAVKLIQKSRRADGEELEEILERLKIISLLIRLALLAVQALEMAKRADDPRLIERLRQLVQEAVKLIQKSRRADGEERQEILATLYRIEYLIRLALRQVQS

SEQ ID NO: 1513 - protein, 232 aa, synthetic construct
  REGION 1..232: note = Synthetic
DELEKQLLEEFHKFTELLKRADGEEREEVEERLKIIQLLLQLALLALQALVYALLADDPELIEILRQLVQEAVKLIQKSRRADGEELEEILERLKIISLLIRLALLAVQALEMAKRADDPELIEILRQLVQEAVKLIQKSRRADGEELKEILERLKIISLLIRLALLAVQALEMAKRADDPELIEILRQLVQEAVKLIQKSRRADGEELEEILHRLYQIELLIRQALKRVQH

SEQ ID NO: 1514 - protein, 249 aa, synthetic construct
  REGION 1..249: note = Synthetic
DRDEELLLELLKLALEARIYMRRSTDPELYEILRKLVELAVEAVRKLEERPTEEIRQLVRDLSLLLKLALLAAQALEYMKRSTDPELYEILRKLVELAVEAIRKLQERPTEEIRQLVRDLSLLLKLALLAAQALEYMKRSTDPELYEILRKLVELAVEAIRKLQERPTEEIRQLVRDLSLLLKLALLAAQALEYMKRSTDPELYEILRKLVELAVEAIRKLQERPTEEIRHLVKHLSLNLKYALHQARL

SEQ ID NO: 1515 - protein, 249 aa, synthetic construct
  REGION 1..249: note = Synthetic
SEDTHLLNELLELADEAREYMKRSTDPELYEILRKLVELAVEAIRKLQERPTEEIRQLVRDLSLLLKLALLAAQALEYMKRSTDPELYEILRKLVELAVEAIRKLQERPTEEIRQLVRDLSLLLKLALLAAQALEYMKRSTDPELYEILRKLVELAVEAIRKLQERPTEEIRQLVRDLSLLLKLALLAAQALEYMKRSTDPSLYEFLRKNVELAVEAIRKLQERPTEEIRLLVELLSVLLEVALRHAQS

SEQ ID NO: 1516 - protein, 265 aa, synthetic construct
  REGION 1..265: note = Synthetic
SERSKLLEEAESLVAQALWLAFQAKRHADPEQIEKFKELAEHAWEIWRLIKEFYKEGDEESMQRLLQLLEAVSLVAQALWLAFQAKRHADPEQIEKFKELAEHAWEIWRLIKEFRKEGDEESMQRLLQLLEAVSLVAQALWLAFQAKRHADPEQIEKFKELAEHAWEIWRLIKEFRKEGDEESMQRLLQLLEAVSLVAQALWLAFQAKRHADPRLIEIFEKLAEIAFLIWELIKEFRKEGDEEQMQRLLRLLRNVSDIARVLWEL

SEQ ID NO: 1517 - protein, 265 aa, synthetic construct
  REGION 1..265: note = Synthetic
SQQQKQARKALLLVVEAVYLALLAEQHADPEQIEKFKELAEHAKEIARLIEEFLREGDEESMQRLLQLLEAVSLVAQALWLAFQAKRHADPEQIEKFKELAEHAWEIWRLIKEFRKEGDEESMQRLLQLLEAVSLVAQALWLAFQAKRHADPEQIEKFKELAEHAWEIWRLIKEFRKEGDEESMQRLLQLLEAVSLVAQALWLAFQAKRHADPRQIERFKELAEHAWEIWRLIKEFRKEGDEESMEELLTELRIVSEIARILLES

SEQ ID NO: 1518 - protein, 265 aa, synthetic construct
  REGION 1..265: note = Synthetic
SEREEQLLIAQRLVLHARELAHQAKRHADPEQIEKFKELAEHAWEIWRLIKEFRKEGDEESMQRLLQLLEAVSLVAQALWLAFQAKRHADPEQIEKFKELAEHAWEIWRLIKEFRKEGDEESMQRLLQLLEAVSLVAQALWLAFQAKRHADPEQIEKFKELAEHAWEIWRLIKEFRKEGDEESMQRLLQLLEAVSLVAQALWLAFQAKRHADPRQRELFKRLAEFAWEIWRLIKEARKRGDEDEMEYLLSLLRAVSLSAHYLWLS

SEQ ID NO: 1519 - protein, 249 aa, synthetic construct
  REGION 1..249: note = Synthetic
DEELVEAYRIVLLLERIARELKKQGSENSEIAKELAETAFELWQRIETATNEEELKRLLMILIAVLLVAQLFKIAVELKKQGSENSEIAKELAETAFELWQRIRTATNEEELKRLLMILIAVLLVAQLFKIAVELKKQGSENSEIAKELAETAFELWQRIRTATNEEELKRLLMILIAVLLVAQLFKIAVELKKQGSENSEQAKELAETAFELWQRIRTATNEEELRRLLEILFQVLLRAETLKEQVES

SEQ ID NO: 1520 - protein, 225 aa, synthetic construct
  REGION 1..225: note = Synthetic
DRLERLALEARIIALQALLYAHEAGDEELEEFVKELIRLITEMTRQGDEEQLRLILLAVQALLLAAQAILYAKKAGDEELEEFVKELIRLITEMTRQGDEEQLRLILLAVQALLLAAQAILYAKKAGDEELEEFVKELIRLITEMTRQGDEEQLRLILLAVQALLLAAQAILYAKKAGDEELEEFVKELIRLITEMTRQGDEEQLRRILYRVYELLSQAKKILFS

SEQ ID NO: 1521 - protein, 254 aa, synthetic construct
  REGION 1..254: note = Synthetic
DHEKIQTEALIAHALSLLLRAEELLKQAGDPESVEIVRQTFRELHELLQEYKETGDEELLEKLRTTVLIAIAIALLALAMLLLKQAGDPESVEIVRQTLRELYELLQEYKETGDEELLEKLRTTVLIAIAIALLALAMLLLKQAGDPESVEIVRQTLRELYELLQEYKETGDEELLEKLRTTVEIAIAIALLALAMLLLKQAGDPESVEIVRQTLRELYELLQEYKETGDEELRQRLFETVLRAQYIAQRAKLS

SEQ ID NO: 1522 - protein, 281 aa, synthetic construct
  REGION 1..281: note = Synthetic
SEIEKEQIEVRFLLEQVRLIAETIFRRTGDPKAQETAQQAIEIAQKFLQMTEEYRRTGDERYRETARILKELLEVLHLLAEVVLLALEIFKKTGDPKAQETAQQAIEIAQKFLQMTEEYRRTGDERYRETARILRELLEVLHLLAEVVLLALEIFKKTGDPKAQETAQQAIEIAQKFLQMTEEYRRTGDERYRETARILKELLEVLHLLAEVVLLALEIFKKTGDPKAQETAQQAIEIAQKFLQMTEEYRRTGDERYRETARRLHQILLDLFEWAEKVLLH

SEQ ID NO: 1523 - protein, 269 aa, synthetic construct
  REGION 1..269: note = Synthetic
DEERTEIRLIALEALYLLNHAKRIAQKMGDEELQETVRRLLELVEQILQKALGSTGEKLEEMKRLLEIVLLAVEAAVLLFKAFSIAQKMGDEELQETVRRLLELVFQILQKALGSTGEKLEEMKRLLEIVLLAVEAAVLLFKAFSIAQKMGDEELQETVRRLLELVFQILQKALGSTGEKLEEMKRLLEIVLLAVEAAVLLFKAFSIAQKMGDEELQETVRRLLELVFQILQKALGSTGEKLKHMYLRLEEVLLEVRVAVKRFELISRS

SEQ ID NO: 1524 - protein, 269 aa, synthetic construct
  REGION 1..269: note = Synthetic
SEREQEIEKLALEAALLLHRAEQIARNMGDEELQETVRRLLELVFQILQKALGSTGEKLEEMKRLLEIVLLAVEAAVLLFKAFSIAQKMGDEELQETVRRLLELVFQILQKALGSTGEKLEEMKRLLEIVLLAVEAAVLLFKAFSIAQKMGDEELQETVRRLLELVFQILQKALGSTGEKLEEMKRLLRIVLLAVEAAVLLFKAFSIAQKMGDEELQETVRRLLELVFQILQKALGSTGEKLEEMRRLLIEVLLRVIEFVLRFEFISES

SEQ ID NO: 1525 - protein, 303 aa, synthetic construct
  REGION 1..303: note = Synthetic
DEIEHQIREAENIANLARLFADRALEIVEHIYKKTGSEEAEELSRIVQEIIRLILEALKEFKRARDEETIEILLQIIRAILLAVQAIFLAIQAFSIVIEIYEKTGSEEAEELSRIVQEIIRLILEALKEFKRARDEKTIEILLQIIRAILLAVQAIYLAIQAFSIVIEIYEKTGSEEAEELSRIVQEIIRLILEALKEFKRARDKETITRLYLIILAILTAVQAIYLAIQAFSIVIEIYEKTGSEEAEELSRIVQEIIRLILEALKEFKRARDRETIERLLELIFRILARVILLFFEIKNFSS

SEQ ID NO: 1526 - protein, 237 aa, synthetic construct
  REGION 1..237: note = Synthetic
DELEHEFFKTLYELLRELLEIEQEGNEEKFQQARELIEVLLQAILAILEILKIIKGVDGEMSELAKEFVQTLLELIRELREIKQEGNEEKFQQAIELILVLVRALKAIAEILKIIKGVDGEMSELAKEFVQTLLELIRELREIKQEGNEEKFQQAIELILVLVRALKAIAEILKIIKGVDGEMSELAKEFVQTLLELIRELREIKQEGNEEKFQRALHEIHRLVLELLRIATELKEL

SEQ ID NO: 1527 - protein, 285 aa, synthetic construct
  REGION 1..285: note = Synthetic
DHESRRMRVQAEHALILAEYAIELLKRQGDDELARLLLEAAQSLLELLRELKEVLQRGNEEEFQRLYKSILMFVLALIAIVQAALAITELKRQGDDELARLLLEAAQSLLELLRELKEVLQRGNEEEFQRLYKSILMFVLALIAIVQAALAITELKRQGDDELARLLLEAAQSLLELLRELKEVLQRGNEEEFQRLYKSILMFVLALIAIVQAALAITELKRQGDDELARLLLEAAQSLLELLRELKEVLQRGNEEEFKRLFHEIFEFVIKLRFIVEHAENVTRS

SEQ ID NO: 1528 - protein, 285 aa, synthetic construct
  REGION 1..285: note = Synthetic
DDESLEMHIRAKRAIVQAALAITELKRQGDDELARLLLEAAQSLLELLRELKEVLQRGNEEEFQRLYKSILMFVLALIAIVQAALAITELKRQGDDELARLLLEAAQSLLELLRELKEVLQRGNEEEFQRLYKSILMFVLALIAIVQAALAITELKRQGDDELARLLLEAAQSLLELLRELKEVLQRGNEEEFQRLYKSILMFVLALIAIVQAALAITELKRQGDDELARLLLEAAQSLLELLRELKEVLQRGNEEEFRKLFLKIKLVVRHLRTLVEEARILTEL

SEQ ID NO: 1529 - protein, 285 aa, synthetic construct
  REGION 1..285: note = Synthetic
DSNLLFMHLLAELAQLVAEHAIRRLKRHGDDELARLLLEAAQSLLELLRELKEVLQRGNEEEFERLFLSIEMFVLALFAIVLAAIAITILLLSGDDELARLLLEAAQSLLELLRELKEVLQRGNEKLFQLLYLSIHMFVLALIAIVQAAIAILLLKEQGDDELARLLLEAAQSLLELLRELKEVLQRGNLEEFLRLLLSIYMFVLALIAIVYAAKAITYLKRVGDDELARLLLEAAQSLLELLRELKEVLQRGNEEEFRRLLELIAELVIRLLHLVFEARVRTTS

SEQ ID NO: 1530 - protein, 285 aa, synthetic construct
  REGION 1..285: note = Synthetic
DLESLEMHLQANVAILRAEFAIRELKRQGDDELARLLLEAAQSLLELLRELKEVLQRGNEEEFQRLYKSILMFVLALIAIVQAALAITELKRQGDDELARLLLEAAQSLLELLRELKEVLQRGNEEEFQRLYKSILMFVLALIAIVQAALAITELKRQGDDELARLLLEAAQSLLELLRELKEVLQRGNEEEFQRLYESILMFVLALIAIVQAALAITELKRQGDDELARLLLEAAQSLLELLRELKEVLQRGNEEEFERLYQLILRFVLELRLIVHQALRETES

SEQ ID NO: 1531 - protein, 249 aa, synthetic construct
  REGION 1..249: note = Synthetic
DLARKVQHLVFLALSFAELIKRMGDEELARELSEFLRRILQNVEEIYQQNDKEKLELILLAAQVLMLVAVAAYYAVKIKKMGDEELARELSEFLRRILQNVEEIFQQNDKEKLELILLAAQVLMLVAVAAYYAVKIKKMGDEELARELSEFLRRILQNVEEIFQQNDKEKLELILLAAQVLMLVAVAAYYAVKIKKMGDEELARELSEFLRRILQNVEEIFQQNDKEKLRRIYLEALRLLNEARLAYEE

SEQ ID NO: 1532 - protein, 272 aa, synthetic construct
  REGION 1..272: note = Synthetic
SEEETKFLLLALEALLIVHKIERLAQQAGDPELSEQAKKLREELQKTYERYRKATDEEELERLYRLMQFLLLAVQALLIVALILLLAQQAGDPELSEQAKKLFEELVKTFERYRKATDEEELERLYRLMQFLLLAVQALLIVALILLLAQQAGDPELSEQAKKLFEELVKTFERYRKATDEEELERLYRLMQFLLLAVQALLIVALILLLAQQAGDPELSEQAKKLFEELVKTFERYRKATDEEELRRLYELMRELLHQVELLLERALRLLL

SEQ ID NO: 1533 - protein, 272 aa, synthetic construct
  REGION 1..272: note = Synthetic
DEEEFKFLELATEALLIVLRILRLALEAGDPELEEQAKKLFEELVKTFERYRKATDEEELERLYRLMQFLLLAVQALLIVALILLLAQQAGDPELSEQAKKLFEELVKTFERYRKATDEEELERLYRLMQFLLLAVQALLIVALILLLAQQAGDPELSEQAKKLFEELVKTFERYRKATDEEELERLYRLMQFLLLAVQALLIVALILLLAQQAGDPELSEQAKKLFEELVKTFERYRKATDEEELERLERIMHQLLTEVYSLLLEAHLILS

SEQ ID NO: 1534 - protein, 272 aa, synthetic construct
  REGION 1..272: note = Synthetic
SQRELQFNLLALEALSLVYHIELLAEHAGDPELSEQAKKLFEELVKTFERYRKATDEEELERLYRLMQFLLLAVQALTIVALILLLAQIAGDPELSEQAKKLFEELVKTFERYRKATDEEELRRLEVFMLFLLLAVQALLIVALILLLAQEAGDPELSEQAKKLFEELVKTFERYRKATDEEELRRLLQLMLFLLLAVQALLIVALILLLAQQAGDPELSEQAKKLFEELVKTFERYRKATDEEELRRLEEIMSRLYLHVLILLFRAYHILS

SEQ ID NO: 1535 - protein, 281 aa, synthetic construct
  REGION 1..281: note = Synthetic
DEEDELTYRLKRLLRLLALLVEELRRSDDPTLRELAQELIESVRELLEQLKKAKKTMSEEQIEQWLRELLLQALLMQLLALLALLVEELRRSDDPTLRELAQELIESVRELLEQLKKAKKTMSEEQIEQWLRELLLQALLMQLLALLALLVEELRRSDDPTLRELAQELIESVRELLEQLKKAKKTMSEEQIEQWLRELLLQALLMQLLALLALLVEELRRSDDPRLRELAQQLIESVRELLELLKEAKKTMSEEQIERILRFLLDKAETLQRLAERALKH

SEQ ID NO: 1536 - protein, 257 aa, synthetic construct
  REGION 1..257: note = Synthetic
DEETKLRILALRIELLVREVYRLVRQAGNPELFEKFREILELILQLIKKVLKAGKDEEAEQIARLALLAALILSLVIEVYLLVRQAGNPELFEKFREILELILQLIKKVLKAGKDEEAEQIARLALLAALILSLVIEVYLLVRQAGNPELFEKFREILELILQLIKKVLKAGKDEEAEQIARLALLAALILSLVIEVYLLVRQAGNPELFEKFREILELILQLIKKVLKAGKDERARETALQALLLAHRLSNEIKRY

SEQ ID NO: 1537 - protein, 256 aa, synthetic construct
  REGION 1..256: note = Synthetic
SKLIELISLLIYAFLLLEELLRQAQENGDPETSKQLRELLRSVKEMIERAKEARSEEEIKLLELVAKLIIAFALLIQLLLQAQENGDPETSKQLRELLRSVKEMIERAKEARSEEEIRLLELVAKLIIAFATLIQLLLQAQENGDPETSKQLRELLRSVKEMIERAKEARSEEEIRLLELVALLIIAFATLIQLLLQAQENGDPETSKQLRELLRSVKEMIERAKEARSEEEIRRLEEVALRIELYAKEIQELLHD

SEQ ID NO: 1538 - protein, 226 aa, synthetic construct
  REGION 1..226: note = Synthetic
EMSEQLERLIEELTRLSKELKGKSEEEFRQNLLLIELLVQAIKVFHLAAHAIRAGVDEEMSEQLKRLLREVEELLQALKGKSEEEFKQLSELIKLLLLAIIVFVLAALAIRAGVDEEMSEQLKRLLREVEELLQALKGKSEEEFEQLSDLIKLLLLAIIVFVLAALAIRAGVDEEMSEQLKRLLREVEELLQALKGKSEEEFNELVEKILRLLTRIRILVRRALKI

SEQ ID NO: 1539 - protein, 257 aa, synthetic construct
  REGION 1..257: note = Synthetic
DEREELALRIIELVLRAFELVLEAERAGVDVEKIRQILEEILRIQEQAKEFLQRGDEESLKRALLAVKIILLVLEAFLLMARAERAGVDVEKIRQILEEILRIQEQAKEFLQRGDEESLKRALLAVKIILLVLEAFLLMARAERAGVDVEKIRQILEEILRIQEQAKEFLQRGDEESLKRALLAVKIILLVLEAFLLMARAERAGVDVEKIRQILEEILRIQEQAKEFLQRGDEESLRRALLEVHYLLLRLRFFLQS

SEQ ID NO: 1540 - protein, 255 aa, synthetic construct
  REGION 1..255: note = Synthetic
MELRAKILVLLVEYFYEQILLLLKEAGVPEEVKETIQRILEIALEALRLLKETGDPKALMIVKAAFLVIQVVYFYAQILLLLKEAGVPEEVKETIQRILEIALEALRLLKETGDPKALMIVKAAFLVIQVVYFYAQILLLLKEAGVPEEVKETIQRILEIALEALRLLKETGDPKALMIVKAAFLVIQVVYFYAQILLLLKEAGVPEEVKETIQRILEIALEALRLLKETGDPRALYLVRQAFLLIEIVFLRAEL

SEQ ID NO: 1541 - protein, 255 aa, synthetic construct
  REGION 1..255: note = Synthetic
SEEEAYHLVLLVESIFLLIERILKEAGVPEEVKETIQRILEIALEALRLLKETGDPKALMIVKAAFLVIQVVYFYAQILLLLKEAGVPEEVKETIQRILEIALEALRLLKETGDPKALMIVKAAFLVIQVVYFYAQILLLLKEAGVPEEVKETIQRILEIALEALRLLKETGDPKALMIVKAAFLVIQVVYFYAQILLLLKEAGVPEEVKETIQRILEIALEALRLLKETGDPKALYLVQEAYALILFVFTRAES

SEQ ID NO: 1542 - protein, 249 aa, synthetic construct
  REGION 1..249: note = Synthetic
SLATEVKLLVLRAEDFARLIKKMGDEELARELSEFLRRILQNVEEIFQQNDKEKLELILLAAQVLMLVAVAAYYAVKIKKMGDEELARELSEFLRRILQNVEEIFQQNDKEKLELILLAAQVLMLVAVAAYYAVKIKKMGDEELARELSEFLRRILQNVEEIFQQNDKEKLELILLAAQVLMLVAVAAYYAVKIKKMGDEELARELSEFLRRILQNVEEIFQQNDHEKLLQIYAQAIFLLIHAVEAYYR

SEQ ID NO: 1543 - protein, 211 aa, synthetic construct
  REGION 1..211: note = Synthetic
DELVQEAESLAYLLELMGFDEELIQLVNEILKEALRNHAMGIDVSESVKLALLVAEAAVMAAHLKQMGFDEELIQLVNEILKEALRNHAMGIDVSESVKLALLVAEAASMAALLKQMGFDEELIQLVNEILKEALRNHAMGIDVSESVKLALLVAEAASMAALLKQMGFDEELIQLVNEILKEALRNHAMGIDVRQVVFHAYIIALEALLS

SEQ ID NO: 1544 - protein, 254 aa, synthetic construct
  REGION 1..254: note = Synthetic
STEEIELFLIAFYALTLLRLVYHVTGDPKAKEMVEQLLELIQEAEESKEQGDLERFRQLLRELTLFAIAYIALALLLLVYFLTGDPKAKEMVEQLLELIQEAEESLEQGDLERFRQLLRELTLFAIAYIALALLLYVYRVTGDPKAKEMVEQLLELIQEAEESLEQGDLERFRQLLRELTLFAIAYIALALLLLVYRLTGDPKAKELVEQLLELIQEAEESLEQGDLERFRQLLRELVELAYHYFVLANLIRRS

SEQ ID NO: 1545 - protein, 252 aa, synthetic construct
  REGION 1..252: note = Synthetic
DELTLHLYLLLLEAENLFRRAREAGDPEALEQALQIVQFVIKLLVETAKRLKELGDLRLLFELLLAILEAAQSLFEMAREAGDPEALEQALQIVQFVIKLLVETAKRLKELGDLEQLFRLLLAILEAAQSLFEMAREAGDPEALEQALQIVQFVIKLLVETAKRLKELGDLEQLFRLLLAILEAAQSLFEMAREAGDPEALEQALQIVQFVIKLLVETAKRLKELGDEQQLLELRLAIIYAEELLFLMAREA

SEQ ID NO: 1546 - protein, 270 aa, synthetic construct
  REGION 1..270: note = Synthetic
DERLRRLRLEVERLQREIEEILQFAKSPEQQQRLKELLQFVIETIQRALEYTKKAGNLEEAEILLRLAFLILEVMRLQWEIEEILQFAKSPEQQQRLKELLQFVIETIQRALEYTKKAGNLEEAEILLRLAFLILEVMRLQWEIEEILQFAKSPEQQQRLKELLQFVIETIQRALEYTKKAGNLEEAEILLRLAFLILEVMRLQWEIEEILQFAKSPEQQEFLKFLLEYVIRTIQRALEYTKKAGNLEEAERLLRQALQILELMRHLFEL

SEQ ID NO: 1547 - protein, 276 aa, synthetic construct
  REGION 1..276: note = Synthetic
DKEEEEALKAEEFIRRAIELALQLFIQAKQLGDPELLRTIKEMIEFALTQIELVRRATDKEELKELIEALTAVAFIIIAIVLALQLFIQAKQLGDPELLRTIKEMIEFALTQIELVRRATDKEELKELIEALTAVAFIIIAIVLALQLFIQAKQLGDPELLRTIKEMIEFALTQIELVRRATDKEELKELIEALTAVAFIIIAIVLALQLFIQAKQLGDPELLRTIKELIEEALTLIELVRRATDKRKLHYLIRLLKLFAIVIITRVEILRTEVES

SEQ ID NO: 1548 - protein, 197 aa, synthetic construct
  REGION 1..197: note = Synthetic
DSELLRARALALDVERLAQQTGDPKLIEVARLLLETLAEMVRRTRTARGEEFEEIQKRLEEITKLIRALYLALRVLQLAQQTGDPKLIEVARLLLETLAEMVRRTRTARGEEFEEIQKRLKIIIFLIEALYLALRVLQLAQQTGDPKLIEVARLLLETLAEMVRRTRTARGEEFEEIRRRLQEILEEIVRLYYYLRS

SEQ ID NO: 1549 - protein, 269 aa, synthetic construct
  REGION 1..269: note = Synthetic
DEESEKQRLLIRVKSFIELVEVLAREAGDPRALELAEELLERLSELLERLKKATDEEEQRRLKEEIQKLLLQARVLYLILLVLLLARKAGDPRALELAEELLERLSELLERLKKATDEEEQRRLKREIEKLLLQARVLFLILLVLILAQQAGDPRALELAEELLERLSELLERLKKATDEEEQRRLKEEIDKLLLQARVLFLILLVLILAQQAGDPRALELAEELLERLSELLERLKKATDEEEQRRLLEEISALLLNARELFEKLREL

SEQ ID NO: 1550 - protein, 194 aa, synthetic construct
  REGION 1..194: note = Synthetic
DEFEIRLRKAELLAHLIHTIAHEAGNPELREAAREVIQSLTELLRKFKRSPTEELIEQVKFVLLLAEAMLLAALIYLIAQRAGNPELREAAREVIQSLTELLRKFKRSPTEELIEQVKFVLLLAEAMLIAALIYLIAQRAGNPELREAAREVIQSLTELLRKFKRSPTEELRRQVEEVLLRAQELLTEALRYLS

SEQ ID NO: 1551 - protein, 210 aa, synthetic construct
  REGION 1..210: note = Synthetic
MERRREFELLVYIAELFARLVEYLAHYTGDPKVWELARLIIESLSELLQQFKKAKSEEEFERMIRRLEFILLVAIAAFFAALVLYIAKKTGDPKVWELARLIIESLSELLQQFKKAKSEQEFFKMYLFLQFILLVAIAALYAALVLLIAKQTGDPKVWELARLIIESLSELLQQFKKAKSKEELEEFFQRLTQLLALAFEALFHALLLLL

SEQ ID NO: 1552 - protein, 211 aa, synthetic construct
  REGION 1..211: note = Synthetic
LEERERLRLLLDLAKSAADFVRQIAEISGDPLILEVAQELLKSVTEMLKELKKAKSEEEIRELLLRVALVLLLALAALLAAIVALIAYISGDPLILEVAQELLKSVTEMLKELKKAKSEEEIRRLFALVALVLLLAFAALFAALVALLAYVSGDPLILEVAQELLKSVTEMLKELKKAKSEEEIRELFRRVTKVLELAVRAASFAATLLAS

SEQ ID NO: 1553 - protein, 218 aa, synthetic construct
  REGION 1..218: note = Synthetic
WLLEQMRQTAVQLTALALYSEDEELSRTVKELAELIRELIQRGDFEKLKEAWLLAQMITTAVRLYETAKRSEDEELSRTVKELAELIWELIQRGDFEKLKEAWLLAQMITTAVRLYETAKRSEDEELSRTVKELAELIWELIQRGDFEKLKEAWLLAQMITTAVRLYETAKRSEDEELSRTVKELAELIWELIQRGDFEKLREALLRALEILLRVRHH

SEQ ID NO: 1554 - protein, 219 aa, synthetic construct
  REGION 1..219: note = Synthetic
DEKFVELRYLLEKARILAKRLGDEEVFQSLQELLRKAKEAQERGDDETIEKLIKQVLLIYLLVRALLMAKELGDEEVFQSLQELLRKAKEAQERGDDETIEKLIKQVLLIYLLVRALLMAKELGDEEVFQSLQELLRKAKEAQERGDDETIEKLIKQVLLIYLLVRALLMAKELGDEEVFQSLQELLRKAKEAQERGDDETIEELLLLVLHIYYRVRHL

SEQ ID NO: 1555 - protein, 211 aa, synthetic construct
  REGION 1..211: note = Synthetic
DTEREKLKLLLRLAHNIALLVELIAHDSGDPLILEVAQELLKSVTEMLKELKKAKSEEEIRELKERVELVLLLAKAALLAALVALIAQQSGDPLILEVAQELLKSVTEMLKELKKAKSEEEIRELKERVELVLLLAKAALLAALVALIAQQSGDPLILEVAQELLKSVTEMLKELKKAKSEEEIKELEERVRHVLHLAFEALQAAERALKA

SEQ ID NO: 1556 - protein, 278 aa, synthetic construct
  REGION 1..278: note = Synthetic
STEIRKLLLLLEELIEEILKLLFELRQAGVDVEKIEEITKLAIETALQVLQTVKRGMDEEEIETLIRIAFLLLLLVLLMLRILKLLFELRQAGVDVEKIEEITKLAIETALQVLQTVKRGMDEEEIETLIRIAFLLLLLVLLMLRILKLLFELRQAGVDVEKIEEITKLAIETALQVLQTVKRGMDEEEIETLIRIAFLLLLLVLLMLRILKLLFELRQAGVDVEEIEELTKLAIEIALQVLQTVKRGMDEERIKLLIYRALLHLREVLYLLEFLKKL

SEQ ID NO: 1557 - protein, 257 aa, synthetic construct
  REGION 1..257: note = Synthetic
DEFEELKSRAEILIQLVETLLRLIRKLATDPKFRELLELALELLKQALQLLKEYTSAETVLFAMLLAQALVLILLVLKLLLEIRERATDPKFRELLELALELLKQALQLLKEYTSAETVLFAMLLAQALQLILLVLLLLLEIRERATDPKFRELLELALELLKQALQLLKEYTSAETVLFAMLLAQALQLILLVLLLLLEIRERATDPKFRELLELALELLKQALQLLKEYTSLEFVHHAFLLAHRLLVLLEKLLRL

SEQ ID NO: 1558 - protein, 272 aa, synthetic construct
  REGION 1..272: note = Synthetic
DRTEELFQLIREIAIRARYLLLLVRHKATSPEFRELVEEILEQIKRSLEEARQAHKEGDDEKLRTIYLFMLILLIAAKAILLLAKVQNKATSPEFRELVEEILEQIKRSLEEARQAHKEGDDEKLRTIYLFMLILLIAAKAILLLALVQQKATSPEFRELVEEILEQIKRSLEEARQAHKEGDDEKLRTIYLFMLILLIAAKAILLLALVQQKATSPEFRELVEEILEQIKRSLEEARQAHKEGDREKLNEIFLFMLRLLILAERILELALS

SEQ ID NO: 1559 - protein, 272 aa, synthetic construct
  REGION 1..272: note = Synthetic
DDTEYLFNEILIIAYRARKLLALVQQKATSPEFRELVEEILEQIKRSLEEARQAHKEGDDEKLRTIYLFMLILLIAAKAILLLALVQQKATSPEFRELVEEILEQIKRSLEEARQAHKEGDDEKLRTIYLFMLILLIAAKAILLLALVQQKATSPEFRELVEEILEQIKRSLEEARQAHKEGDDEKLRTIYLFMLILLIAAKAILLLALVQQKATSPEFRELVEEILEQIKRSLEEARQAHKEGDREKLRRIFVFMLELLIIAESILERALV

SEQ ID NO: 1560 - protein, 245 aa, synthetic construct
  REGION 1..245: note = Synthetic
DKENEIQEILLRVETIFKQIIRIAQKAGLDAEKVKEEMERAIQELRRLYESGSDEALKQVKILLIFAQVILIFIQIILIAQKAGLDAEKVKEEMERAIQELRRLYESGSDEALKQVKILLIFAQVILIFIQIILIAQKAGLDAEKVKEEMERAIQELRRLYESGSDEALKQVKILLIFAQVILIFIQIILIAQKAGLDAEKVKEEMERAIQELRRLYESGSDEAFEEVLHLLLHARTILRRIRSS

SEQ ID NO: 1561 - protein, 238 aa, synthetic construct
  REGION 1..238: note = Synthetic
DKERTEILQLLLLVYEISQTLTDPESQERIRQSYEEIKRLLEEAKRAGDKERIKEVYLLAQIFLILALVMLISQTLTDPESQERIRQSFEEIKRLLEEAKRAGDKERIKEVYLLAQIFLILALVMLISQTLTDPESQERIRQSFEEIKRLLEEAKRAGDKERIKEVYLLAQIFLILALVMLISQTLTDPESQERIRQSFEEIKRLLEEAKRAGDKERIKRVLQLAKFLLVEAELILVS

SEQ ID NO: 1562 - protein, 241 aa, synthetic construct
  REGION 1..241: note = Synthetic
DELEEILNRILLILTKVRRIAKELGDEETWEELYQRVKELLELARQALEAGDEEKLRLILLMAQIVLLLSLVLQIAKELGDEETWEELYQRVKELLELARQALEAGDEEKLRLILLMAQIVLLLSLVLQIAKELGDEETWEELYQRVKELLELARQALEAGDEEKLRLILLMAQIVLLLSLVLQIAKELGDEETWEELYQRVKELLELARQALEAGDELLLLEILVEAENVLLRSRIKKLR

SEQ ID NO: 1563 - protein, 241 aa, synthetic construct
  REGION 1..241: note = Synthetic
SDLEEIFLRILIILLRVRKIAKELGDEETWEELYQRVKELLELARQALEAGDEEKLRLILLMAQIVLLLSLVLQIAKELGDEETWEELYQRVKELLELARQALEAGDEEKLRLILLMAQIVLLLSLVLQIAKELGDEETWEELYQRVKELLELARQALEAGDEEKLRLILLMAQIVLLLSLVLQIAKELGDEETWEELYQRVKELLELARQALEAGDETLLYKILLLAEIVLFESRSLQRS

SEQ ID NO: 1564 - protein, 239 aa, synthetic construct
  REGION 1..239: note = Synthetic
SKRIYLKILEIVVRLEEFAKQMGDPELIERIRQNVEELIRQAKEASEEGDMEKLQMILITAQILLIVTKLLWFAKQMGDPELIERIRQNVEELIRQAKEASEEGDMEKLQMILITAQILLIVTKLLWFAKQMGDPELIERIRQNVEELIRQAKEASEEGDMEKLQMILITAQILLIVTKLLWFAKQMGDPELIERIRQNVEELIRQAKEASEEGDENLLRVILQRAETLLERTEYLWRS

SEQ ID NO: 1565 - protein, 219 aa, synthetic construct
  REGION 1..219: note = Synthetic
DQLALKVYLFALLIEYLAREAGNEEAKQFVRELQETVLRARQQGDEEQLRKALLALVVMYWALEIQFLARLAGNEEAKQFVRELQETVLRAWQQGDEKQLFLAYLALVVMWWALEIQLLAEEAGNEEAKQFVRELQETVLRAWQQGDREQLFLALLALRVMWWALEIQKLAEEAGNEEAKQFVRELQETVLRAWQQGDLEQLIHALLLLEHMHYELLYS

SEQ ID NO: 1566 - protein, 239 aa, synthetic construct
  REGION 1..239: note = Synthetic
DVEIYIKILRIVLDLEKIALRIGDPELIERIRQNVEELIRQAKEAFEEGDMEKLQMILITAQILLIVTKLLWFAKQMGDPELIERIRQNVEELIRQAKEASEEGDMEKLQMILITAQILLIVTKLLWFAKQMGDPELIERIRQNVEELIRQAKEASEEGDMEKLQMILITAQILLIVTKLLWFAKQMGDPELIERIRQNVEELIRQAKEASEEGDEEKLQRILIQAELLLNETERRWRS

SEQ ID NO: 1567 - protein, 239 aa, synthetic construct
  REGION 1..239: note = Synthetic
MEEIFQKILRIVFELELIAELIGDPELIERIRQNVEELRRQAKEASEEGDMEKLQMILITAQILLIVTKLLWFAKHMGDPELIERIRQNVEELIRQAKEASEEGDMEKLQMILITAQILLIVTKLLWFAKQMGDPELIERIRQNVEELIRQAKEASEEGDMEKLQMILITAQILLIVTKLLWFAKQMGDPELIERIRQNVEELIRQAKEASEEGDEEKLHEILIEAESLLQHTELRWRS

SEQ ID NO: 1568 - protein, 239 aa, synthetic construct
  REGION 1..239: note = Synthetic
MEEIFEEIIRIVNLLRAFAQIIGDPELIERIRQNVEELERQAREALEEGDMEKLQMILITAQILLIVTKLLYFAKKMGDPELIERIRQNVEELIRQAKEASEEGDMEKLQMILITAQILLIVTKLLWFAKQMGDPELIERIRQNVEELIRQAKEASEEGDMEKLQMILITAQILLIVTKLLWFAKQMGDPELIERIRQNVEELIRQAKEASEEGDLEKLNHILFEALFLLEQTKQLWFA

SEQ ID NO: 1569 - protein, 246 aa, synthetic construct
  REGION 1..246: note = Synthetic
SIWRALERQIRSIEHRIRVAEIEGDEELWREATESAQEVLREVKEYLQQAKEQGDKESIWRALLLMILVIIALILLAKVTGDEELWREATESAQEVLREVKEYLQQAKEQGDKESIWRALLLMILVIIALILLAKVTGDEELWREATESAQEVLREVKEYLQQAKEQGDKESIWRALLLMILVIIALILLAKVTGDEELWREATESAQEVLREVKEYLQQAKEQGDKESIKRALELYELVVHALVL

SEQ ID NO: 1570 - protein, 246 aa, synthetic construct
  REGION 1..246: note = Synthetic
SIWRALLERIRVIESAIHFAEYFGDEETWRKATELAQEVLREVKEYLQQAKEQGDKESIWRALLLMILVIIALILLAKVTGDEELWREATESAQEVLREVKEYLQQAKEQGDKESIWRALLLMILVIIALILLAKVTGDEELWREATESAQEVLREVKEYLQQAKEQGDKESIWRALLLMILVIIALILLAKVTGDEELWREATESAQEVRREVEEYIRQAHEQGDHESFERALRLFLLVQHALRL

SEQ ID NO: 1571 - protein, 280 aa, synthetic construct
  REGION 1..280: note = Synthetic
KILKALRRLIIRILTLIDLARRLFEQGDLEEVKQTLQRALESAREVLESAQEMLQRAKEMGDLEKILEALEVLILVILALILLAELLLKFGDLEKVKQTLQRALESAREVLESAQEMLQRAKEMGDLEKILEALEVLILVILALILLAELLLRFGDLEKVKQTLQRALESAREVLESAQEMLQRAKEMGDLEKILEALEVLILVILALILLAELLLKFGDLEKVKQTLQRALESAREVYESAKEMLQRAKEMGDLEKILEAREVIELVLKALALLYFLLH

SEQ ID NO: 1572 - protein, 288 aa, synthetic construct
  REGION 1..288: note = Synthetic
DEVEQILIEMKQLARQAIYFALLAKRLADSPESQQKVEELLQRIKELIERAIKTLETKGIEEAYRTALVILILVRMLLLAVQAIYFALLAKRLADSPESQQKVEELLQRIKELIERAIKTLETKGIEEAYRTALVILILVRMLLLAVQAIYFALLAKRLADSPESQQKVEELLQRIKELIERAIKTLETKGIEEAYRTALVILILVRMLLLAVQAIYFALLAKRLADSPESQQKVEELLQLIKELIERAIKTLETKGIEEAYKYARFILYLVYALLLRVRHIYEQLLS

SEQ ID NO: 1573 - protein, 288 aa, synthetic construct
  REGION 1..288: note = Synthetic
DEVEEILHEMRQLAIRARRFARLAKRLADSPESQQKVEELLQRIKELIERAIKTLETKGIEEAYRTALVILILVRMLLLAVQAIYFALLAKRLADSPESQQKVEELLQRIKELIERAIKTLETKGIEEAYRTALVILILVRMLLLAVQAIYFALLAKRLADSPESQQKVEELLQRIKELIERAIKTLETKGIEEAYRTALVILILVRMLLLAVQAIYFALLAKRLADSPESQQKVEELLQRIKENIERAIKTLETKGIEEAHQVALRILAQVHVLLLNVQHIYFALLA

SEQ ID NO: 1574 - protein, 288 aa, synthetic construct
  REGION 1..288: note = Synthetic
DEVEQILLHMRSLAHEARSTAIEAKRLADSPESQQKVEELLQRIKELIERAIKTLETKGIEEAYRTALVILILVRMLLLAVQAIYFALLAKRLADSPESQQKVEELLQRIKELIERAIKTLETKGIEEAYRTALVILILVRMLLLAVQAIYFALLAKRLADSPESQQKVEELLQRIKELIERAIKTLETKGIEEAYRTALVILILVRMLLLAVQAIYFALLAKRLADSPESQQKVEELLQRIKELIERAIKTLETKGIEEARQVALEILALVFYLLVQVRLIYERLLS

SEQ ID NO: 1575 - protein, 288 aa, synthetic construct
  REGION 1..288: note = Synthetic
DLVEHILLEMELLAYEARLFAKLAKELADSPESQQKVEELLQRIKELIERAIKTLETKGIEEAYRTALVILILVRMLLLAVQAIYFALLAKRLADSPESQQKVEELLQRIKELIERAIKTLETKGIEEAYRTALVILILVRMLLLAVQAIYFALLAKRLADSPESQQKVEELLQRIKELIERAIKTLETKGIEEAYRTAKVILILVRMLLLAVQAIYFALLAKRLADSPESQQKVEELLQRIKELIERAIKTLETKGIEEALRVALRILSDVYVLLELVQEIYFALLS

SEQ ID NO: 1576 - protein, 234 aa, synthetic construct
  REGION 1..234: note = Synthetic
DEFERLSLEILVLVYFVRLFAELLGDPKLLRLMEQILEEIQRVLASTSEEAKEQLEFIFLSAQILVLVARVSHLAKLLGDPKLLRLMEQILEEIQRVLASTSEEAKEQLEFIFLSAQILLLVALVSELAKRLGDPKLLRLMEQILEEIQRVLASTSEEAKEQLRFIFLSARILLLVALVSELAKRLGDPKLLRLMEQILEEIQRVLASTSEEAFEQLQHIYQLASRLLFEALES

SEQ ID NO: 1577 - protein, 253 aa, synthetic construct
  REGION 1..253: note = Synthetic
SRLEELLLRIETLILLVQLLLEILRKLFSEETSERMQQNIERIEEWFKKAEETGDEEEVRLVYLLALILTLIARVLLLLQELRKQFSEETSERMQQNIERIEEWFKKATETGDEEEVRLVYLLALILTLIAIVLLLLQQLRKQFSEETSERMQQNIERIEEWFKKATETGDEEEVRLVYYLALILTLIAIVLLLLQQLRKQFSEETSERMQQNIERIEEWFKKATETGDRQEVLHVYFLAERLTLEAEILLQR

SEQ ID NO: 1578 - protein, 253 aa, synthetic construct
  REGION 1..253: note = Synthetic
DELEELLNRIETLIFLVKLNLEHLRKLFSEETSERMQQNIERIEEWFKKATETGDEEEVRLVYLLALILTLIAHVLLLLQQLRRLFSEETSERMQQNIERIEEWFKKATETGDEEEVRLVYLLALILTLIARVLLLLQELRKQFSEETSERMQQNIERIEEWFKKATETGDRREVYLVYLLALILTLIAIVLLLLQQLRKQFSEETSERMQQNIERIEEWFKKATETGDIREVIHVYVLAVRLTLIAEILLLS

SEQ ID NO: 1579 - protein, 242 aa, synthetic construct
  REGION 1..242: note = Synthetic
SKIEQKIHAIELEMREEWYKVKQAGGDARQLKEVLQIVIEIILEALRSGDKEDLEFALLAVEIALILAKMILNWYKVKQAGGDARQLKEVLQIVIEIILEALRSGDKEDLEFALLAVEIALILAKMILNWYKVKQAGGDARQLKEVLQIVIEIILEALRSGDKEDLEFALLAVEIALILAKMILNWYKVKQAGGDARQLKEVLQIVIEIILEALRSGDHNDLLQALIAVLQALILANRILQS

SEQ ID NO: 1580 - protein, 216 aa, synthetic construct
  REGION 1..216: note = Synthetic
DELEEARIIAQLVETAARIILQFAEQLKRRGNLELAQRLIELVEELLQLLLELLRLMKQGDERARELLEALLIAVRVALAAVFILKIAEELKKNGNLELAQRLIELVEELLQLLLELLRLMKQGDRRARELLLALLIAVFVATAAVIILQIAEELKKNGNLELAQRLIELVEELLQLLLELLRLMKQGDHRALELLTELAEAVLRALLLVHRLKEA

SEQ ID NO: 1581 - protein, 281 aa, synthetic construct
  REGION 1..281: note = Synthetic
DQAREWFQLLKSLFEELKELYKQLQEQGDEESLKLIEIVLELMKRILEQAKRSLEEGAGEEDVIRLLQAAIWIALLARFFLKLKELYKQLQEQGDEESLKLIEIVLELMKRILEQAKRSLEEGAGEEDVIRLLQAAIWIALLAEFFLRLKELYKQLQEQGDEESLKLIEIVLELMKRILEQAKRSLEEGAGEEDVIRLLEAAIFIALLAEFFLRLKELYKQLQEQGDERSLKVIEIVLELMKRILEQAKRSLEEGAGSREVIQLLIEALLLALYAELFVRS

SEQ ID NO: 1582 - protein, 241 aa, synthetic construct
  REGION 1..241: note = Synthetic
DEQELELRILIFRARLLLEHALRLADTPELREVIEELIKSLKQLMEEFRRTGDQKIFQIAVLLVLIAIAIVLLIKALKKADTPELREVIEELIKSLKQLMEEFRRTGDQKIFQIAVLLVLIAIAIVLLIQALKKADTPELREVIEELIKSLKQLMEEFRRTGDQKIFHIAKLLVLIAIAIVLLIQALKKADTPELREVIEELIKSLKQLMEEFRRTGDEKIYREAVLLVYEAIEVVLRIQS

SEQ ID NO: 1583 - protein, 266 aa, synthetic construct
  REGION 1..266: note = Synthetic
AERIEQMELFLTEIELIALKAETLARRLGDPELYELAVQSFKEVLEQARQVIENQRKNPEQAKRILEMLWWLVLILYLALKAIELAKRLGDPELYELAVQSFKEVLEQARQVIENQRKNPEQAKRILEMLWWLVLILYLALKAIELAKRLGDPELYELAVQSFKEVLEQARQVIENQRKNPEQAKRILEMLWWLVLILYLALKAIELAKRLGDPELYELAVQSFKEVLEQARQVIENQRKNPEEARRLLLELYLLVLKIFFHLLQL

SEQ ID NO: 1584 - protein, 266 aa, synthetic construct
  REGION 1..266: note = Synthetic
AERIREMEFLLDHIRLIALLAILLARLLGDPELYELAVQSFKEVLEQARQVIENQRKNPEQAKRILEMLWWLVLILYLALKAIELAKRLGDPELYELAVQSFKEVLEQARQVIENQRKNPEQAKRILEMLWWLVLILYLALKAIELAKRLGDPELYELAVQSFKEVLEQARQVIENQRKNPEQAKRILEMLWLLVLILYLALKAIELAKRLGDPELYELAVQSFKEVLEQARQVIENQRKNPEQARRLLLELLDRVYHLFNQLELL

SEQ ID NO: 1585 - protein, 285 aa, synthetic construct
  REGION 1..285: note = Synthetic
DEREHIELEILLIKIELKRIAELIIKLAKELGDPELYRQARETFQELLEELQKVFEIAASSDEEEVKRARELMEILWWIAVLLLIALLIIKLAKELGDPELYRQARETFQELLEELQKVFEIAASSDEEEVKRARELMEILWWIAVLLLIALLIIKLAKELGDPELYRQARETFQELLEELQKVFEIAASSDEEEVKRARELMEILWWIAVLLLIALLIIKLAKELGDPELYRQARETFQELLEELQKVFEIAASSDHREVQEARILMYRLHEIARRLLEELLRI

SEQ ID NO: 1586 - protein, 285 aa, synthetic construct
  REGION 1..285: note = Synthetic
VKRARELKEIREWIQELRLIARLILTLAELLGDPELYRQARETFQELLEELQKVFEIAASSDEEEVKRARELMEILWWIAVLLYIALRIIYLAKLLGDPELYRQARETFQELLEELQKVFEIAASSDEEEVKRARELMEILWWIAVLLLIALLIIKLAKELGDPELYRQARETFQELLEELQKVFEIAASSDEEEVKRARILMYILWNIAVLLLIALLIIKLAKELGDPELYRQARETFQELLEELQKVFEIAASSDEEEVRHALELMVELLLIALRILEQLRLS

SEQ ID NO: 1587 - protein, 219 aa, synthetic construct
  REGION 1..219: note = Synthetic
DHRENEAEILILIVELLARQLGDPESREMVRELSEEWRKAVQTGDEEKLEKILRQAQALLLILLVSYLAKELGDPESREMVRELSEEWRKAVQTGDEEKLEKILRQAQALLLILLVSQLAKELGDPESREMVRELSEEWRKAVQTGDEEKLEKILLQAQALLLILLVSQLAKELGDPESREMVRELSEEWRKAVQTGDEEKLLRILLEAFRLLLELQRS

SEQ ID NO: 1588 - protein, 275 aa, synthetic construct
  REGION 1..275: note = Synthetic
DEEANELLLRAISILLEIQFLAEIAGIPGMFEQAEELIQQIRETMKKAQENVRMGKMSLEDLLLLLEAYLLLARAVYFLVKILYLALQAGIPGMFEQAEELIQQIIETMKKAQENVRMGKMSLEDLLLLLEAYLLLARAVYFLVVILLLAKRAGIPGMFEQAEELIQQIIETMKKAQENVRMGKMSLEDLLLLLEAYLTLATAVYFLVVILLLAKRAGIPGMFEQAEELIQQIIETMKKAQENVRMGKMSLRDLLRLLVRYLSIAIQLFFEVRFE

SEQ ID NO: 1589 - protein, 275 aa, synthetic construct
  REGION 1..275: note = Synthetic
SVEAYRLLLRALYFLLSIRVLARHAGIPGMFEQAEELIQQIIETMKKAQENVRMGKMSLEDLLLLLEAYLLLARAVYFLVEILLLAKRAGIPGMFEQAEELIQQIIETMKKAQENVRMGKMSLEDLLLLLEAYLLLARAVYFLVVILLLAKRAGIPGMFEQAEELIQQIIETMKKAQENVRMGKMSLEDLLLLLEAYLLLARAVYFLVVILLLAKRAGIPGMFEQAEELIQQIIETMKKAQENVRMGKMSLEDLLHLLRHYLIRAIYLFLQVRES

SEQ ID NO: 1590 - protein, 238 aa, synthetic construct
  REGION 1..238: note = Synthetic
ITLTLLKEIVIKLLVLALEAVLSGDPQNIREIMEEVKQQIRELRQRAKESTDKEITLTLLKLIVELLLSLAELAVKSGDPQEIREIMEEVKQQIRELRQRAKESTDKEITLTLLKLIVELLLILAELAVKSGDPQEIREIMEEVKQQIRELRQRAKESTDKEITLTLLKLIVELLLILAELAVKSGDPQEIREIMEEVKQQIRELRQRAKESTDKEIHQTLYRLILLLEVILRYLKHS

SEQ ID NO: 1591 - protein, 282 aa, synthetic construct
  REGION 1..282: note = Synthetic
DFLERLRLEFLSLADLVRRIVLEAEVLGDQKYAEQALEDLEKLEEIMQQISELLREKVKQTGDPEEFLQILKQIFRLLAELVELFVLAAEVAGDQRAAEKALELLEKLEEIMQQISELLREKVKQTGDPEEFLQILKQIFRLLAELVELFVLAAEVAGDQRAAEKALELLEKLEEIMQQISELLREKVKQTGDPEEFLQILKQIFRLLAELVELFVLAAEVAGDQRAAEKALELLEKLEEIMQQISELLREKVKQTGDPQEFREIELTEIRLRHELIELREL

SEQ ID NO: 1592 - protein, 282 aa, synthetic construct
  REGION 1..282: note = Synthetic
EFLEKLENEFLFLAEEVRLFVEYAERLGDQRAAEYALELLEKLEEIMQQISELLREKVKQTGDPEEFLQILKQIFRLLAELVELFVLAAEVAGDQRAAEKALELLEKLEEIMQQISELLREKVKQTGDPEEFLQILKQIFRLLAELVELFVLAAEVAGDQRAAEKALELLEKLEEIMQQISELLREKVKQTGDPEEFLQILKQIFRLLAELVELFVLAAEVAGDQRAAEKALELLEKLEEIMQQISELLREKVKQTGDPEEFRQIEEQELELRQELFHLQRL

SEQ ID NO: 1593 - protein, 242 aa, synthetic construct
  REGION 1..242: note = Synthetic
DEELLRAEVLFRLARLVLREILRQVTDEEEKQKLREVTRTLLELLQEMAKQGDIESVLSLAEALLLFLQAKLILVEILRQVTDEEEKQKLREVTRTLLELLQEMAKQGDIESVLSLAEALLLFLQAKLILVEILRQVTDEEEKQKLREVTRTLLELLQEMAKQGDIESVLSLAEALLLFLQAKLILVEILRQVTDEEEKQKLREVTRTLLELLQEHAKQGDYLHVLHLAEQLLLFLRFYLNS

SEQ ID NO: 1594 - protein, 242 aa, synthetic construct
  REGION 1..242: note = Synthetic
DESLQRAELLFLLAELYLELILRDVTDEEEKQKLREVTRTLLELLQEMAKQGDIESVLSLAEALLLFLRAKLILVEILKQVTDEEEKQKLREVTRTLLELLQEMAKQGDIESVLSLAEALLLFLQAKLILVEILRQVTDEEEKQKLREVTRTLLELLQEMAKQGDIESVLSLAEALLLFLQAKLILVEILRQVTDEEEKQKLREVTRTLLELLQEMAKQGDIERVHQLALHLLTFLYEYLKN

SEQ ID NO: 1595 - protein, 242 aa, synthetic construct
  REGION 1..242: note = Synthetic
DESKYKARLNFEYARHILELILRQVTDEEEKQKLREVTRTLLELLQEMAKQGDIESVLSLAEALLLFLQAKLILVEILRQVTDEEEKQKLREVTRTLLELLQEMAKQGDIESVLSLAEALLLFLQAKLILVEILRQVTDEEEKQKLREVTRTLLELLQEMAKQGDIESVLLLAEALLLFLQAKLILVEILRQVTDEEEKQKLREVTRTLLELLQEMAKQGDSKEVWFLAIQLLLFLRHKLES

SEQ ID NO: 1596 - protein, 262 aa, synthetic construct
  REGION 1..262: note = Synthetic
DETLEYLRRQAELDVRYTAREAGFSEEEIKKLVKTMIRLLKEIWQEVQEEIRRLGYSPEDANLLAELLLRAALEVWITALQAGFSEEEIKKLVKTMIRLLKEIWQEVQEEIRRLGYSPEDANLLAELLLRAALEVWITALQAGFSEEEIKKLVKTMIRLLKEIWQEVQEEIRRLGYSPEDANLLAELLLRAALEVWITALQAGFSEEEIKKLVKTMIRLLKEIWQEVQEEIRRLGYSPEEAQLLAISLLEFALREFQLRLRL

SEQ ID NO: 1597 - protein, 256 aa, synthetic construct
  REGION 1..256: note = Synthetic
DRELELELLVLEVKYFIYKAFQIAKELGDPEQQEVAKQSLEELIKIFQLIQKGVDLEELKRRLELILLVMQVLVWIVRAFRIAKELGDPEQQEVAKQSLEELIKIFQLIQKGVDLEELKRRLELILLVMQVLVWIVRAFRIAKELGDPEQQEVAKQSLEELIKIFQLIQKGVDLEELKRRLELILLVMQVLVWIVRAFRIAKELGDPEQQEVAKQSLEELIKIFQLIQKGVDLDQLKFLLLELLNRMRLLVRHVES

SEQ ID NO: 1598 - protein, 221 aa, synthetic construct
  REGION 1..221: note = Synthetic
DERELEAELLITRVRRLAKQMGDPEMREIVKELEERFRQILQEGDDEKLERLLRQAEAALLIALVYLLAKQMGDPEMREIVKELLERFRQILQEGDDEKLERLLRQAEAALLIALVYLLAKQMGDPEMREIVKELLERFRQILQEGDDEKLERLLRQAEAALLIALVYLLAKQMGDPEMREIVKELLERFRQILQEGDDHKLQRLLLEAQFALERALEYLL

SEQ ID NO: 1599 - protein, 255 aa, synthetic construct
  REGION 1..255: note = Synthetic
SEIAKVTLLYLVVEFIQQVREQLKRGVLDEETQQRLLLEMAQLLFERLKKAGVPEEDILEAIAELVLLALVDIFIEQVREQLKRGVLDEETQQRLLLEMAQLLFEILKKAGVPEEDILEAIAELVLLALVDIFIEQVREQLKRGVLDEETQQRLLLEMAQLLFEILKKAGVPEEDILKAIALLVLLALVDIFIEQVREQLKRGVLDEETQQRLLLEMAQLLFEILKKAGVPERLIRLAERHLRLIAEQDILEEQS

SEQ ID NO: 1600 - protein, 221 aa, synthetic construct
  REGION 1..221: note = Synthetic
AKELLRHIHHLVLRARAYLYRGDLERAQELLEKIRRNLQEVFEIAKEQGDAKLLLQVIELMVLLAELYLLMGDLEKAQELLEKIRRNLQEVFEIAKEQGDAKLLLQVIELMVLLAELYLLMGDLEKAQELLEKIRRNLQEVFEIAKEQGDAKLLLQVIELMVLLAELYLLMGDLEKAQELLEKIRRNLQEVFEIAKEQGDLHLLELVLRLQLRLRILENLM

SEQ ID NO: 1601 - protein, 184 aa, synthetic construct
  REGION 1..184: note = Synthetic
RITLLLLERFLLELELLALRALLLGDEEKLEQIFQLVKRLFEEVKQRAENSDDPRITLLLLELALKALKLMAEIAQKLGDEEKLEQIFQLVKRLFEEVKQRAENSDDPRITLLLLELALKALKLMAEIAQKLGDEEKLEQIFQLVKRLFEEVKQRAENSDDPRIRNQLRILAIRAELLRHQIKS

SEQ ID NO: 1602 - protein, 184 aa, synthetic construct
  REGION 1..184: note = Synthetic
DETLVRLFEFLARLEVLAFRAELRGDEEKLEQIFQLVKRLFEEVKQRAENSDDPRITLLLLELALKALKLMAEIAQKLGDEEKLEQIFQLVKRLFEEVKQRAENSDDPRITLLLLELALKALELMAEIAQTLGDEEKLEQIFQLVKRLFEEVKQRAENSDDPEIKRRLHQLAIQAEALRRQIRS

SEQ ID NO: 1603 - protein, 184 aa, synthetic construct
  REGION 1..184: note = Synthetic
DDTLIRLYHFLQHLFYLAVEAELRGDEEKLEQIFQLVKRLFEEVKQRAENSDDPRITLLLLELALKALKLMAEIAQKLGDEEKLEQIFQLVKRLFEEVKQRAENSDDPRITLLLLELALKALKLMAEIAQKLGDEEKLEQIFQLVKRLFEEVKQRAENSDDPRIRLHLKSLAINAESLLIEIKS

SEQ ID NO: 1604 - protein, 230 aa, synthetic construct
  REGION 1..230: note = Synthetic
DELENELKTLIIQVERLAKEAKRQGDEELFQHLREIMERAQENAKASDPEYVKTAILLLQLAILIFIVSQLAKEAKRQGDEELFQHLREIMERAQENAKASDPEYVKTAILLLQLAILIFIVSQLAKEAKRQGDEELFQHLREIMERAQENAKASDPEYVRRAILLLQLAILIFIVSQLAKEAKRQGDEELFQYLREIMERAQENAKASDPRRVIEAIFLLLAARLIFHH

SEQ ID NO: 1605 - protein, 239 aa, synthetic construct
  REGION 1..239: note = Synthetic
TERLEEILTRLRSFVHQARLLLNKIDDEETSRRLKEFLEQVLQTAREALERNDPETARLALILVILLFYVLKAILLLKKIDDEETSRRLKEFLEQVLQTAREALERNDPETARLALILVILLYYVLKAILLLKKIDDEETSRRLKEFLEQVLQTAREALERNDPETARLALILVILLYYVLKAILLLKKIDDEETSRRLKEFLEQVLQTAREALERNDPETAHRALLLVRELFLRLRLI

SEQ ID NO: 1606 - protein, 239 aa, synthetic construct
  REGION 1..239: note = Synthetic
TDELEILLTELRLFVLRAEQLLRKIDDEETSRRLKEFLEQVLQTAREALERNDPETARLALILVILLYYVLKAILLLKKIDDEETSRRLKEFLEQVLQTAREALERNDPETARLALILVILLYYVLKAILLLKKIDDEETSRRLKEFLEQVLQTAREALERNDPETARLALILVILLYYVLKAILLLKKIDDEETSRRLKEFLEQVLQTAREALERNDPRTALKALSRVLYLFVELEEL

SEQ ID NO: 1607 - protein, 239 aa, synthetic construct
  REGION 1..239: note = Synthetic
DEELEHIFDELRVFVHRARKLLRKIDDEETSRRLKEFLEQVLQTAREALERNDPETARLALILVILLYYVLKAILLLKKIDDEETSRRLKEFLEQVLQTAREALERNDPETARLALILVILLYYVLKAILLLKKIDDEETSRRLKEFLEQVLQTAREALERNDPETARLALILVILLYYVLKAILLLKKIDDEETSRRLKEFLEQVLQTAREALERNDPETAERALKQVRELFLHLELI

SEQ ID NO: 1608 - protein, 239 aa, synthetic construct
  REGION 1..239: note = Synthetic
SVELRSILLKLEAFVHHAEQLLKKIDDEETSRRLKEFLEQVLQTAREALERNDPETARLALILVILLYYVLKAILLLKKIDDEETSRRLKEFLEQVLQTAREALERNDPETARLALILVILLYYVLKAILLLKKIDDEETSRRLKEFLEQVLQTAREALERNDPETARLALILVILLYYVLKAILLLKKIDDEETSRRLKEFLEQVLQTAREALERNDPITAFEALTLVRLLFLRLQEI

SEQ ID NO: 1609 - protein, 221 aa, synthetic construct
  REGION 1..221: note = Synthetic
ELEEKEHEALRLIFQAEHLAQLMGDPKFREAVERLIELFLRVLRNGDEEKLELILKQASALVYIVLASIEAQKMGDPKFREAVERLIELFLRVLRNGDEEKLELILKQASALWYIVLASLMAQQMGDPKFREAVERLIELFLRVLRNGDEEKLELILLQARALWFIVLASLMAQQMGDPKFREAVERLIELFLRVLRNGDEEKLHEIFLDAIKLFFRVELS

SEQ ID NO: 1610 - protein, 239 aa, synthetic construct
  REGION 1..239: note = Synthetic
TERLHEILQRLEQYVLAAEVLLRNIDDEETSRRLKEFLEQVLQTAREALERNDPETARLALILVILLYYVLLAILLLKKIDDEETSRRLKEFLEQVLQTAREALERNDPETARLALILVILLYYVLKAILLLKKIDDEETSRRLKEFLEQVLQTAREALERNDPHTAELALILVILLYYVLKAILLLKKIDDEETSRRLKEFLEQVLQTAREALERNDPRTALEALVLVHLLYQRLEEI

SEQ ID NO: 1611 - protein, 241 aa, synthetic construct
  REGION 1..241: note = Synthetic
DEMEEIVTRLRLLIHLAEFLIRYANDEETSERLKQILEEAVKTAVEALRRGDLESLEMALIVAQLIVLIAEASRLIQKANDEETSERLKQILEEAVKTAVEALRRGDLESLEMALIVAQLIYLIALASLLIQKANDEETSERLKQILEEAVKTAVEALRRGDKRSLEMALLVAFLIYLIALASLLIQKANDEETSERLKQILEEAVKTAVEALRRGDIESLIEALALAYRIFYLARLSLQS

SEQ ID NO: 1612 - protein, 261 aa, synthetic construct
  REGION 1..261: note = Synthetic
DRIEKIIALLYHIEVLLHHLLKKLRKEGSDLYRELEELIKQIQELIERAKEAQEQGDPEKARMVLILAQLILIVAQLLILLWELRKEGSDLYRELEELIKQIQELLERAKEAFEQGDPEKARMVLILAQLILIVAQLLQLLWELRKEGSDLYRELEELIKQIQELLERAKEAFEQGDPEKARMVLILAQLILIVAQLLQLLWELRKEGSDLYRELEELIKQIQELLERAKEAFEQGDPHKAQRVLIQALFILLLAELLQRS

SEQ ID NO: 1613 - protein, 253 aa, synthetic construct
  REGION 1..253: note = Synthetic
DKMEKLVLRIELIALEIRFFLRILQEQGNYEIVELIKELVREALRLALEAARLNDPKLLKMALLVVQIALYAAKIAHFLFELQRQGNYEIVELIKELVREALRLALEAARLNDPKLLKMALLVVQIALYAAKIAYFLFELQQQGNYEIVELIKELVREALRLALEAARLNDPKLLRMALLVVQIALFAAKIAYFLFELQQQGNYEIVELIKELVREALRLALEAARLNDPKLLSRALVIVQRALIDAEEAHDS

SEQ ID NO: 1614 - protein, 238 aa, synthetic construct
  REGION 1..238: note = Synthetic
DELREIALRIEIIATEIRVLMRQANDEEVIELIKELLRLALQTAKEALELNDPELLKIALFAVLIALIAVKITILMRQANDEEVIELIKELLRLALQTAKEALELNDPELLKIALFAVLIALIAVKITILMRQANDEEVIELIKELLRLALQTAKEALELNDPELLKIALFAVLIALIAVKITILMRQANDEEVIELIKELLRLALQTAKEALELNDPELLREALYLVLEALLRVELS

SEQ ID NO: 1615 - protein, 238 aa, synthetic construct
  REGION 1..238: note = Synthetic
DKIAEFAREIKRIAELIRVNMKYANDEEVIELIKELLRLALQTAKEALELNDPELLKIALFAVLIALIAVLITILMQKANDEEVIELIKELLRLALQTAKEALELNDPELLKIALFAVLIALIAVKITILMRQANDEEVIELIKELLRLALQTAKEALELNDPELLKIALLAVLIALIAVKITILMRQANDEEVIELIKELLRLALQTAKEALELNDPHLLREALKAVLRALQDVEHT

SEQ ID NO: 1616 - protein, 226 aa, synthetic construct
  REGION 1..226: note = Synthetic
DEEEYLRLELKQAIELAIKAIILLAQMVQAGSDSEEAQELIELLQEAIRIALELVKEYKRTGDEELSEQLRLVVELLRAIALAIKAIILLAQMVQAGSDSEEAQELIELLQEAIRIALELVKEYKRTGDEELSEQLRLVVELLRAIALAIKAIILLAQMVQAGSDSEEAQELIELLQEAIRIALELVKEYKRTGDEELKLKLFQIVLELISLAIRIKHLIKRAQMV

SEQ ID NO: 1617 - protein, 256 aa, synthetic construct
  REGION 1..256: note = Synthetic
DEIEKIRLLVRLVEHKLKEAILLAKKMGDEESAQLAKELARQIIEIAKLMFQTGDPRLFEIAEILALVLEVFAELVKAILLAKKMGDEESAQLAKELARQIIEIAKLMFQTGDPRLFEIAEILALVLEVFAELVKAILLAKKMGDEESAQLAKELARQIIEIAKLMFQTGDPRLFEIAEILALVLEVFAELVKAILLAKKMGDEESAQLAKELARQIIEIAKLMFQTGDPRLLREAERLAHQLRSFALQVRVKEIS

SEQ ID NO: 1618 - protein, 256 aa, synthetic construct
  REGION 1..256: note = Synthetic
DEIREIRLIVEYVHLLLERAIKLAKKMGDEESAQLAKELARQIIEIAKLMFQTGDPRLFEIAEILALVLEVFAELVKAILLAKKMGDEESAQLAKELARQIIEIAKLMFQTGDPRLFEIAEILALVLEVFAELVKAILLAKKMGDEESAQLAKELARQIIEIAKLMFQTGDPRLFEIAEILALVLEVFAELVKAILLAKKMGDEESAQLAKELARQIIEIAKLMFQTGDPRLFEIAEHLAHELERFATRVKQILKS

SEQ ID NO: 1619 - protein, 201 aa, synthetic construct
  REGION 1..201: note = Synthetic
DKAEELLLEALHLVLLIYRRTGDPRLKELFERILQLLELLQAGKGDPEEASERAKAVLLLLQALLMVLRIYEKTGDPRLKELFERILQLLELLQAGKGDPEEASERAKAVLLLLQALLMVLRIYEKTGDPRLKELFERILQLLELLQAGKGDPEEASERARLVLLLLQILLNVLELLERIGDPTFKEIFEEILRHLEETQA

SEQ ID NO: 1620 - protein, 218 aa, synthetic construct
  REGION 1..218: note = Synthetic
DELSAEVIHLILYVRLILKKAENPELQEAMEKAIREALRALESGDEEQLKFASLLLLVVILIFRVYQILQRAENPELQEAMEKAIREALRAIESGDEEQLKFASLLLLVVILIWRVYQILQRAENPELQEAMEKAIREALRAIESGDEEQLKFASLLLLVVILIWRVYQILQRAENPRLQEQMEKAIREALRAIESGDERQLFEASFLLKLVIELWRS

SEQ ID NO: 1621 - protein, 274 aa, synthetic construct
  REGION 1..274: note = Synthetic
SHELNRLKSEVESLLEQLQRLAEEMKKYGDPLYEIVQEAWQQALESFRRAQEYEEQGDLEEAIKLLKLALLIVKVAIFLTRLQRLAEEMKKYGDPLYEIVQEAWQQALESFRRAQEYEEQGDLEEAIKLLKLALLIVKVAIFLTRLQRLAEEMKKYGDPLYEIVQEAWQQALESFRRAQEYEEQGDLEEAILLLLLALLIVKVAIFLTRLQRLAEEMKKYGDPRYEFVQKAWQEALESFRRAQEYEEQGDLHRAIVILELALVVVEIAERYVKS

SEQ ID NO: 1622 - protein, 250 aa, synthetic construct
  REGION 1..250: note = Synthetic
SEQSQHLKLLIKQLLHHLLELWRANGDEIVWEVWKKVRELFERAQEYEKQGDFEESFRFLQSATLMALIAKLLFELLQLWRANGDEIVWEVWKKVRELFERAQEYEKQGDFEESFRFLQSATLMALIAKLLFELLQLWRANGDEIVWEVWKKVRELFERAQEYEKQGDFEESFKFLVSATLMALIAKLLFELLQLWRANGDELVWEIWKEVREYFERAQEFEKQGDFEYSIILLLIATYLALIAIELFEH

SEQ ID NO: 1623 - protein, 224 aa, synthetic construct
  REGION 1..224: note = Synthetic
DEHERRRQEVEILFKRVIEQIKRSDDEETMKQLRELAQRALEYAKSKDPEDLQFALNLLLVALLFYRVIEQIKRSDDEETMKQLRELAQRALEYAKSKDPEDLQFALNLLLVALLFYRVIEQIKRSDDEETMKQLRELAQRALEYAKSKDPEDLQFALNLLLVALLFYRVIEQIKRSDDEETMKRLRELAQKALEFAKSKDPHDLRFALLLLLLALNLFERSES

SEQ ID NO: 1624 - protein, 222 aa, synthetic construct
  REGION 1..222: note = Synthetic
SEIEQTFLRLLHLVLEAEKLAEELGDEESIEKLRRTLEKAERASQQGDLEQLQILLTLVELMYLVLEAIKLAKELGDEESIEKLRRTLEKAERASQQGDLEQLQILLTLVELMYLVLEAIKLAKELGDEESIEKLRRTLEKAERASQQGDLEQLQILLTLVELMYLVLEAIKLAKELGDEESIEKLRRTLEKAERASQQGDLEQLERLLREVRLILLRLEQL

SEQ ID NO: 1625 - protein, 222 aa, synthetic construct
  REGION 1..222: note = Synthetic
DELEQIYVEAVSLAVQIISLAKRLGDQETIEEARRTLEQVEEMLERGDEQKLRLLTTLLQALLLALQIIYIAKKLGDQETIEEARRTQEQVIEMHERGDEQKLRLLTTLLQALLLALQIIEIAKKLGDQETIEEARRTQEQVIEMHERGDEQKLRLLTTLLQALLLALQIIEIAKKLGDQETIEEARRTQEQVIEMHERGDEKKLLRLTLKLEYILLELEIS

SEQ ID NO: 1626 - protein, 222 aa, synthetic construct
  REGION 1..222: note = Synthetic
DRLEETTIEAAALAIAIRVLAELLGDQETIEEARRTQEQVKEMYERGDEQKLRLLTTLLQALLLALLIIYLAKRLGDQETIEEARRTQEQVIEMHERGDEQKLRLLTTLLQALLLALQIIRIAKKLGDQETIEEARRTQEQVIEMHERGDEHKLILLTTLLQALLLALQIIEIAKKLGDQETIEEARRTQEQVIEMHERGDLEKLLRLTIQLYYILLRLQRI

SEQ ID NO: 1627 - protein, 225 aa, synthetic construct
  REGION 1..225: note = Synthetic
DTIEHAIELARQAIINAELIYELTGDPKALEISRLLTELIKRVRSGIDTEEILTIVEAMLLAVRAILLAIQIYKLTGDPKALEISRLLTELIKRVASGIDTEEILTIVEAMLLAVQAIKLAIEIYRQTGDPKALEISRLLTELIKRVASGIDTEEILQIVEAMLLAVQAIKLAIEIYRQTGDPKALEISRLLTELIKRVASGIDTEEIYEIVFRMLLEVRQIKRS

SEQ ID NO: 1628 - protein, 213 aa, synthetic construct
  REGION 1..213: note = Synthetic
SIEEQIHEAEYILRRARFLAERAGDEELSEILKRLMKQIVRHPSDPEKIEILLQIARALLLLIEAVLLAQEAGDEELSEILKRLMKQIVRHPSDPEKIEILLQIARALLLLIEAVLLAQEAGDEELSEILKRLMKQIVRHPSDPEKIEILLQIARALLFLIEAVLLAQEAGDEELSEILKRLMKQIVRHPSDPHKIRQLLFEALLLLLEIRQS

SEQ ID NO: 1629 - protein, 213 aa, synthetic construct
  REGION 1..213: note = Synthetic
DIEEKIHEAQAILLAAITIAHLAGDEELSEILKRLIKQIVRHPSDPEKIEILLQIARALLLLILAVRLAQKAGDEELSEILKRLMKQIVRHPSDPEKIEILLQIARALLLLIEAVLLAQEAGDEELSEILKRLMKQIVRHPSDPEKIRILLLIARALLLLIEAVLLAQEAGDEELSEILKRLMKQIVRHPSDPEKIIRLLSIAYELLLRIEQS

SEQ ID NO: 1630 - protein, 213 aa, synthetic construct
  REGION 1..213: note = Synthetic
SILEQIYEARIFLRIAVVLAELAGDEELSEILKRLMKQIVRHPSDPEKIEILLQIARALLLLIFAVLLARQAGDEELSEILKRLMKQIVRHPSDPEKIEILLQIARALLLLIEAVLLAQRAGDEELSEILKRLMKQIVRHPSDPEKIHILLLIAEALLVLIEAVLLAQEAGDEELSEILKRLMKQIVRHPSDPEKIIELLTIAYRLLNRIRQS

SEQ ID NO: 1631 - protein, 207 aa, synthetic construct
  REGION 1..207: note = Synthetic
DEIRLRVLEIAYRVIRLAEELGDMEVSEMVRRLSETAKRSTDEETLRIILIIAQVLLIALQVIKLAEELGDMEVSEMVRRLSETAKRSTDEETLRIILIIAQVLLIALQVIKLAEELGDMEVSEMVRRLSETAKRSTDEETLRIILIIAQVLLIALQVIKLAEELGDMEVSEMVRRLSETAKRSTDERTLLEILLQARVILILLEHN

SEQ ID NO: 1632 - protein, 222 aa, synthetic construct
  REGION 1..222: note = Synthetic
LRLELLLRRILEIFYQLEIQVRIAGDMETLRKAKEIAQRAFEAALSGDLETLRLMLLVLQILQIFIELKLQVKEAGDMETLRKAKEIAQRAFEAALSGDLETLRLMLLVLQILQIFIELKQQVKEAGDMETLRKAKEIAQRAFEAALSGDLETLRLMLLVLQILQIFIELKQQVKEAGDMETLRKAKEIAQRAFEAALSGDLETLRRMLYLLRELQLRIELL

SEQ ID NO: 1633 - protein, 222 aa, synthetic construct
  REGION 1..222: note = Synthetic
DRLERLLNKIRSIFYELEILVKEAGDMETLRKAKEIAQRAFEAALSGDLETLRLMLLVLQILLIFIELKLQVKRAGDMETLRKAKEIAQRAFEAALSGDLETLRLMLLVLQILQIFIELKQQVKEAGDMETLRKAKEIAQRAFEAALSGDLETLELMLLVLQILQIFIELKQQVKEAGDMETLRKAKEIAQRAFEAALSGDLETLFRALAELRLLQLHIEKK

SEQ ID NO: 1634 - protein, 218 aa, synthetic construct
  REGION 1..218: note = Synthetic
SEMEELLFEAELILQRLEFIAQKLGDEELQEKAREVLQRLFENSFRDPEFVEMALLLLKAIIILLKLLEIAQKLGDEELQEKAREVLQRLFENSFRDPEFVEMALLLLKAIIILLKLLEIAQKLGDEELQEKAREVLQRLFENSFRDPEFVEMALLLLKAIIILLKLLEIAQKLGDEELQEKAREVLQRLFENSFRDPNYVERALLLLRLIIVELRLL

SEQ ID NO: 1635 - protein, 226 aa, synthetic construct
  REGION 1..226: note = Synthetic
DELEFEIRQLIRELLQLMKQAKKQGNEVWEILKEALEEASKAYRSGDPEQIRRAILLVEIAILVFELLQLMKQAKKQGNEVWEILKEALEEASKAFRSGDPEQIRRAILLVEIAILVFELLQLMKQAKKQGNEVWEILKEALEEASKAFRSGDPEQIRRAILLVEIAILVFELLQLMKQAKKQGNEVWRFLKLALEYASRAFRSGDPRKIKIAIDIVKTAIRVFHL

SEQ ID NO: 1636 - protein, 226 aa, synthetic construct
  REGION 1..226: note = Synthetic
SELRSEISRLITLLEDLMREAKKQGNEVWEILKEALEEASKAFRSGDPEQIRRAILLVEIAILVFELLQLMKQAKKQGNEVWEILKEALEEASKAFRSGDPEQIRRAILLVEIAILVFELLQLMKQAKKQGNEVWEILKEALEEASKAFRSGDPEQIRRAILLVEIAILVFELLQLMKQAKKQGNRVWRILKEALEFASKAFRSGDPQDILLAIFIVLVAILIFES

SEQ ID NO: 1637 - protein, 234 aa, synthetic construct
  REGION 1..234: note = Synthetic
DEEKELILKVLLLIVRALRLAKEAGDETIHQLARELEEETKRLRNLSEEELEEKLQELMRIVKVLMLIASALTSAKKAGDETIYQLARELAEETKRLRNLSEEELEEKLQELMRIVKVLMLIASALTSAKKAGDETIYQLARELAEETKRLRNLSEEELEEKLQELMRIVKVLMLIASALTSAKKAGDETIYQLARELAEETKRLRNLSEEELKHKLERLEHEVRLLMHRASEL

SEQ ID NO: 1638 - protein, 234 aa, synthetic construct
  REGION 1..234: note = Synthetic
DEEELLILEVRYLIYTALRLAREAGDETIYQLARELAEETKRLRNLSEEELEEKLQELMRIVKVLMLIASALTSAKKAGDETIYQLARELAEETKRLRNLSEEELEEKLQELMRIVKVLMLIASALTSAKKAGDETIYQLARELAEETKRLRNLSEEELEEKLHELMLIVKVLMLIASALTSAKKAGDETIYQLARELAEETKRLRNLSEEELRHELARLLIEVKRLMHIASRL

SEQ ID NO: 1639 - protein, 222 aa, synthetic construct
  REGION 1..222: note = Synthetic
DELRELLFEALVLLAAAETIARLLGDEEQLQQIRETKERVIEVMRQGDPEKLKLLLLLVKALYYLLLASFIARLLGDEEQLQQIRETSERVIEVMRQGDPEKLKLLLLLVKALFYLLQASQIAKELGDEEQLQQIRETSERVIEVMRQGDPRKLLLLLLLVLALFYLLQASQIAKELGDEEQLQQIRETSERVIEVMRQGDPEKLLRLLTLVYELFHRLRLS

SEQ ID NO: 1640 - protein, 256 aa, synthetic construct
  REGION 1..256: note = Synthetic
DRLEELLLHALLLLTKARRIAKELLERTGDPEAKEILEQIKQTREEVIRAFRAGDEEKLRMALLLATALYYLVRAFLLAKQLLERTGDPEAKEILEQIKQTSEEVIRAFRAGDEEKLRMALLLATALYYLVRAFLLAKQLLERTGDPEAKEILEQIKQTSEEVIRAFRAGDEEKLRMALLLATALYYLVRAFLLAKQLLERTGDPEAKEILEQIKQTSEEVIRAFRAGDEQKLREALLIAILLYHQVKTFLERKQL

SEQ ID NO: 1641 - protein, 256 aa, synthetic construct
  REGION 1..256: note = Synthetic
DRMERLLIEALLYLSRAYLLAELLLRRTGDPEAKEILEQIKQTSEEVIRAFRAGDEEKLRMALLLATALYYLVRAFLLAKELLEKTGDPEAKEILEQIKQTSEEVIRAFRAGDEEKLRMALLLATALYYLVRAFLLAKQLLERTGDPEAKEILEQIKQTSEEVIRAFRAGDERKLEMALLLATALYFLVRAFLLAKQLLERTGDPEAKEILEQIKQTSEEVIRAFRAGDHEKLIKALSLAIEIYLHVEHRLREKQS

SEQ ID NO: 1642 - protein, 241 aa, synthetic construct
  REGION 1..241: note = Synthetic
DKIEEMINEAKRLFVEIEILADRLQTKYGDPQAKRILESAREIVEKVEKSDDERELKILLMILEALWLFLLISLLAKQLQRQYGDPQAKRILESAREIVEKVEKSDDERELKILLMILEALWLFLLISLLAKQLQRQYGDPQAKRILESAREIVEKVEKSDDERELKILLMILEALWLFLLISLLAKQLQRQYGDPEAKRILESAREIVEKVEKSDDRRELLRLLLELKYLLELLRILLRT

SEQ ID NO: 1643 - protein, 256 aa, synthetic construct
  REGION 1..256: note = Synthetic
LRMALLLETAREYLNEAYAIAYLLLRLTGDPEAKEILEQIKQTSEEVIRAFRAGDEEKLRMALLLATALYYLVRAFKLAKRLLEKTGDPEAKEILEQIKQTSEEVIRAFRAGDEEKLRMALLLATALYYLVRAFLLAKQLLERTGDPEAKEILEQIKQTSEEVIRAFRAGDEEKLRMALLLATALYFLVRAFLLAKQLLERTGDPEAKEILEQIKQTSEEVIRAFRAGDEEKLHEALLIAVELLVRVKFFLERKQS

SEQ ID NO: 1644 - protein, 225 aa, synthetic construct
  REGION 1..225: note = Synthetic
SELEELLIRLAVFVFQALLIALHLGDEETFQELREILEQAKRAMEAGDPEKLKLLLLLVILLYFVVQALEIAKRLGDEETYQELREISEQAKRAMEAGDPEKLKLLLLLVILLYFVVQALEIAKRLGDEETYQELREISEQAKRAMEAGDPEKLKLLLLLVILLYFVVQALEIAKRLGDEETYQELREISEQAKRAMEAGDPEKLEELLHEVRELYHRVHRLEKS

SEQ ID NO: 1645 - protein, 225 aa, synthetic construct
  REGION 1..225: note = Synthetic
SELERLLLRLQVLVNEALLIAHQLGDEETYQELREIKEQAKRAMEAGDPEKLKLLLLLVILLFFVVQALEIAKRLGDEETYQELREISEQAKRAMEAGDPEKLKLLLLLVILLYFVVQALEIAKRLGDEETYQELREISEQAKRAMEAGDPEKLKLLLLLVILLYFVVQALEIAKRLGDEETYQELREISEQAKRAMEAGDPRKLFQLLAEVYRLFLHVHLLERS

SEQ ID NO: 1646 - protein, 207 aa, synthetic construct
  REGION 1..207: note = Synthetic
LELIQRVRLILLNAQNLAKEMGDEESFELLKQLVQRASQGVDPEELRTLLLIAKVMLILLLALYLAKEMGDEESFELLKQLVQRASQGVDPEELRTLLLIAKVMLILLEALKLAKEMGDEESFELLKQLVQRASQGVDPRELYLLLLIAKVMLVLLEALKLAKEMGDEESFELLKQLVQRASQGVDPRELLELLVIALQILYELREL

SEQ ID NO: 1647 - protein, 246 aa, synthetic construct
  REGION 1..246: note = Synthetic
DELELEVKVVIARAEILAREIRHKDEELWQKLIELIRQVLEQLQEAIERGDPEYIRTVLLIARVIATIAKAIKLALEIKRKDEELWQKLIELIRQVLEQLQEAIERGDPEYIRTVLLIARVISTIAKAIKLALEIKRKDEELWQKLIELIRQVLEQLQEAIERGDPEYIRTVLLIARVISTIAKAIKLALEIKRKDEELWQKLIELIRQVLEHLQEAIERGDPRFIHQVLLLAQLISSLARYILYS

SEQ ID NO: 1648 - protein, 242 aa, synthetic construct
  REGION 1..242: note = Synthetic
SELEEMLFRARAYLELLQELSKQGDEVAKEVFETVKRLIERAIKYTQQGDLEEAEKLLRLAIMLAEAVRYLVELQRLSKQGDEVAKEVFETVKRLIERAIKYTQQGDLEEAEKLLHLAILLAEAVRYLKRLQELSKQGDEVAKEVFETVKRLIERAIKYTQQGDLRRALLLLLLAILLAEAVQYLKRLQELSKQGDEKAKETFERVKRLIERAIKYTQQGDLEHAQELLLRAILLAEYVEYL

SEQ ID NO: 1649 - protein, 238 aa, synthetic construct
  REGION 1..238: note = Synthetic
SELAIRARYLIQRAEEIARRVTDEEQLRQSLEIVQRILEELKRVFLNGDEEKLKFVLLAAQAILLILLALEHAQSVTDEEQLRQSLEIVQRILEELKRVFLNGDEEKLKFVLLAAQAILLILLALEHAQSVTDEEQLRQSLEIVQRILEELKRVFLNGDEEKLHFVLLAAQAILLILLALEHAQSVTDEEQLRQSLEIVQRILEELKRVFLNGDEKRLIEVLLLALEILLRLRTLEEL

SEQ ID NO: 1650 - protein, 238 aa, synthetic construct
  REGION 1..238: note = Synthetic
DEIANRARVLIRLAELHARSVTDEEQLRQSLEIVQRILEELKRVFLNGDEEKLKFVLLAAQAIFLILRALEHAQSVTDEEQLRQSLEIVQRILEELKRVFLNGDEEKLKFVLLAAQAILLILLALEHAQSVTDEEQLRQSLEIVQRILEELKRVFLNGDERKLRFVLLAAQAILLILLALEHAQSVTDEEQLRQSLEIVQRILEELKRVFLNGDYRRLLQVYAEALFILLYLRHLERS

SEQ ID NO: 1651 - protein, 248 aa, synthetic construct
  REGION 1..248: note = Synthetic
SETEETLRKAEQLAQELLELLEEMKQMPEETLEKAKRLVETAFELVQRAQRSTDPREIQTLFTLIQAIKLAVELLKLLEEMKQMPEETLEKAKRLVETAFELVQRAQRSTDPREIQTLFTLIQAIKLAVELLKLLEEMKQMPEETLEKAKRLVETAFELVQRAQRSTDPREIQTLFTLIQAIKLAVELLKLLEEMKQMPEELLEEAKRHVETAFELVQRAQRSTDPREIRLLFLRIYVIVLLVRTIKS

SEQ ID NO: 1652 - protein, 219 aa, synthetic construct
  REGION 1..219: note = Synthetic
DLLYEEAFTFIALIILLAELLGDEESSKRARELEEQLREVYERGDPEKLRLILLFVQAMYYIILIIKLAEELGDEESSKRARELLEQLEEVLQRGDPEKLRLILLFVQAMYYIILIIKLAEELGDEESSKRARELLEQLEEVLQRGDPEKLRLILLFVQAMYYIILIIKLAEELGDEESSKRARELLEQLEEVLQRGDPEKLRRILLEVRYMYLRIRVS

SEQ ID NO: 1653 - protein, 241 aa, synthetic construct
  REGION 1..241: note = Synthetic
DEILHMIEEALWLFELIHELALLLEHQYGDPQAKRILESAREIVEKVEKSDDERELKILLMILEALWLFLLISLLAKRLQRQYGDPQAKRILESAREIVEKVEKSDDERELKILLMILEALWLFLLISLLAKQLQRQYGDPQAKRILESAREIVEKVEKSDDERELEILLLILLALWLFLLISLLAKELQRKYGDPQAKRILESAREIVEKVEKSDDKEELLRLLLELYKLLTELRLRLRS

SEQ ID NO: 1654 - protein, 216 aa, synthetic construct
  REGION 1..216: note = Synthetic
DDFRLEVLVEALKLFEELLRRTGDFEEAAIQVIQTIKRIFKKAGMPEELLQQAAMYLVLYVAKLLFEELLRRTGDFEEAAIQVIQTIKRIFKKAGMPEKLLEQAAMYLVLEVAKELFEELLRRTGDFEEAAIQVIQTIKRIFKKAGMPEKLLEHAAMYLVLEVAKELFEELLRRTGDFEEAAIQVIQTIKRIFKKAGMPEELLIYAQVVLRLEVRS

SEQ ID NO: 1655 - protein, 222 aa, synthetic construct
  REGION 1..222: note = Synthetic
SELEELVVKARYLIELAKLIAEELGDEKLLEVMRRILEFLKEALQRGDMEKVKLVWLVALALYLIAKASVLAQELGDEKLLEVMRRILEFLKEALQRGDMEKVKLVWLVALALYLIALASKLAQELGDEKLLEVMRRILEFLKEALQRGDMEKVHLVWLVALALYLIALASKLAQELGDEKLLEVMRRILEFLKEALQRGDIQKVLHVTILAYRLFYQAELS

SEQ ID NO: 1656 - protein, 222 aa, synthetic construct
  REGION 1..222: note = Synthetic
SEEEFLVIQARVFINAASTLAKHLGDEKLLEVMRRILEFLKEALQRGDMEKVKLVWLVALALLLIALASLLAFVLGDEKLLEVMRRILEFLKEALQRGDMEKVELVWLVALALYLIALASLLAKELGDEKLLEVMRRILEFLKEALQRGDKKKVILVSLVAEALYLIALASKLAQELGDEKLLEVMRRILEFLKEALQRGDHQKVIHVVTLAYHLFLEALQS

SEQ ID NO: 1657 - protein, 219 aa, synthetic construct
  REGION 1..219: note = Synthetic
DEFVREVELILNTAETLARIAGNEELLEILKEALRSLEEILKAGDLEKARMVWFVALVILLLARAFYLAQKAGNEELLEILKEALRSLEEILKAGDLEKARMVWFVALVILLLALAFILAQQAGNEELLEILKEALRSLEEILKAGDLEKAEMVWIVALVILILALAFILAQQAGNEELLEILKEALRSLEEILKAGDRRKAREVLTLAHRILLEAEEF

SEQ ID NO: 1658 - protein, 247 aa, synthetic construct
  REGION 1..247: note = Synthetic
QEKLELLFREVENLIRLAELLARQAGDEELVEIARTAAEFLKRALENSRKNDEEALKQIKLVYMFASVVYLIAQALLLAQKAGDEELVEIARTAAEFLKRALENSRKNDEEALKQIKLVYMFASVVYLIAQALLLAQKAGDEELVEIARTAAEFLKRALENSRKNDEEALKQIKLVYMFASVVYLIAQALLLAQKAGDEELVEIARTAAEFLKRALENSRKNDEEARRQIRHVYTFAEEVYEEAEKL

SEQ ID NO: 1659 - protein, 247 aa, synthetic construct
  REGION 1..247: note = Synthetic
QEELVHMFRRVEYLIEQALKLAQKAGDEELVEIARTAAEFLKRALENSRKNDEEALKQIKLVYMFASVVYLIAQALLLAQKAGDEELVEIARTAAEFLKRALENSRKNDEEALKQIKLVYMFASVVYLIAQALLLAQKAGDEELVEIARTAAEFLKRALENSRKNDEEALKQIKLVYMFASVVYLIAQALLLAQKAGDEELVEIARTAAEFLKRALENSRKNDRQARLLILHVFLLALQVFLDAQQL

SEQ ID NO: 1660 - protein, 222 aa, synthetic construct
  REGION 1..222: note = Synthetic
DKIEELVLRAELLVQLALHLARQLGDEEALEMLKEILRQILEILQRGDLEKAKIVYLVIQAALLVLRALKLARELGDEEALEMLKEILRQILEILQRGDLEKAKIVYLVIQAALLVLQALKLARELGDEEALEMLKEILRQILEILQRGDLEKAKIVYLVIQAALLVLQALKLARELGDEEALEMLKEILRQILEILQRGDEQKARQVLLEIYFILLHLRNL

SEQ ID NO: 1661 - protein, 253 aa, synthetic construct
  REGION 1..253: note = Synthetic
SEVELLVLEAEILAERAMKQAKQLEEAGNKEQAQEFKEVLREIVEQILRILRTGDLEKAKIVLLVIKALLLALEAMKQAKQLEEAGNKEQAQEFKEVLREIVEQILRILRTGDLEKAKIVLLVIKALLLALEAMKQAKQLEEAGNKEQAQEFKEVLREIVEQILRILRTGDLEKAKIVLLVIKALLLALEAMKQAKQLEEAGNKEQAQEFKEVLREIVEQILRILRTGDETQARLVLLRILLLLLELEYTHES

SEQ ID NO: 1662 - protein, 246 aa, synthetic construct
  REGION 1..246: note = Synthetic
DELEVRARYLIQLARHLAERLKQLGNKSAQIILEIVNELIRQLQEAIRRGDLEIIEEVLRMAKAVLLIARAIRLALKLKQLGNKSAQIILEIVNELIRQLQEAIRRGDLEIIEEVLRMAKAVLLIARAIELALKLKQLGNKSAQIILEIVNELIRQLQEAIRRGDLEIIEEVLRMALAVLLIARAIELALKLKQLGNKRAQIILEIVNELIRQLQEAIRRGDLEIIKEVLELALKVLTVAELLERL

SEQ ID NO: 1663 - protein, 222 aa, synthetic construct
  REGION 1..222: note = Synthetic
DELELLELQIRFLLQEAKVIMRRLGDEELWKLIQKAQELLKEAIERGDEELLRLAFLVVQIILLLALATEIMQRLGDEELWKLIQKAQELLKEAIERGDEELLRLAFLVVQIILLLALATEIMQRLGDEELWKLIQKAQELLKEAIERGDEELLRLAFLVVQIILLLALATEIMQRLGDEELWKLIQKAQELLKEAIERGDEELLRRARIVVLRILLHARDL

SEQ ID NO: 1664 - protein, 241 aa, synthetic construct
  REGION 1..241: note = Synthetic
LKIELMIQEALQLYAQIQVLARTLQRRYGDPQAKRILESAREIVEKVEKSDDERELKILLMILEALWLFLLISLLAKQLQRQYGDPQAKRILESAREIVEKVEKSDDERELKILLMILEALWLFLLISLLAKQLQRQYGDPQAKRILESAREIVEKVEKSDDERELRILLMILEALWLFLLISLLAKQLQRQYGDPQAKRILESAREIVEKVEKSDDERELRELLLILKYLLEYLEISLKL

SEQ ID NO: 1665 - protein, 222 aa, synthetic construct
  REGION 1..222: note = Synthetic
DELKKLYVRLLELALRVLELAVEAGDPEFEQSAREIEERAKRLQENGDLEEMQKLIEFLKLLLLALLVLKLAKEAGDPEFVQSAREILERAKRLQENGDLEEMQKLIEFLKLLLLALLVLKLAKEAGDPEFVQSAREILERAKRLQENGDLEEMQKLIEFLKLLLLALLVLKLAKEAGDPEFVQSAREILERAKRLQENGDRRRMQELFFFLLLLLQQLRNL

SEQ ID NO: 1666 - protein, 281 aa, synthetic construct
  REGION 1..281: note = Synthetic
DELEELEQKIRLILLRAEAVMTFLREQGNEEQAKQLLRLIQKVIEFVERVQELIKQGDYEEAKRFLELALLLAKIALLLALAIFIMILLRQQGNEEQAKQLLRLIQKVIEFVERVQELIKQGDYEEAKRFLELALLLAKIALLLAQAIYIMIELREQGNEEQAKQLLRLIQKVIEFVERVQELIKQGDYEEAKRFLELALLLAEIALILAQAIQIMIELREQGNEEQAKQLLRLIQKVIEFVERVQELIKQGDYEEARRFLLRALELASKALTRARTILLS

SEQ ID NO: 1667 - protein, 225 aa, synthetic construct
  REGION 1..225: note = Synthetic
DEHEFLEIEVEVILNSARTLVEHLGDEELRELIELAMETLKKAIQEGDLETLRMVYLIASVVLLLALALLLVLLLGDEELRELIELAMETLKKAIQEGDLETLEMVYLIASVVLLLAQALRLVKRLGDEELRELIELAMETLKKAIQEGDRETLRFVYLIAQVVLILAQALELVKRLGDEELRELIELAMETLKKAIQEGDEETLRRVLKIAHEVLIEAQYLELS

SEQ ID NO: 1668 - protein, 225 aa, synthetic construct
  REGION 1..225: note = Synthetic
DEMEFLEYQVESLLYEAQLLVELLGDEELRELIELAMETLKKAIQEGDLETLRMVYLIASVVLLLAQALFFVRLLGDEELRELIELAMETLKKAIQEGDHRTLLFVLLIASVVLLLAQALQLVKKLGDEELRELIELAMETLKKAIQEGDQRTLLFVYLIALVVLLLAQALELVKRLGDEELRELIELAMETLKKAIQEGDRETLHRVLKLAFEVLLEARQKFYS

SEQ ID NO: 1669 - protein, 222 aa, synthetic construct
  REGION 1..222: note = Synthetic
DELEETIEQIEHYALLIIILAERMNDEETTKRVRELVEKAFEANEAGDEESLRLLLTIIQILLYAVLIIHLAQKMNDEETTKRVRELMEKAFEANEAGDEESLRLLLTIIQILLYAVQIIHLAEQMNDEETTKRVRELMEKAFEANEAGDEESLRLLLLIIQILLYAVQIILLAQRMNDEETTKRVRELMEKAFEANEAGDEESLKRLLEEIIRLLTHVRLS

SEQ ID NO: 1670 - protein, 222 aa, synthetic construct
  REGION 1..222: note = Synthetic
DREELTIQRIFRHAILIQFLAELMNDEETTKRVRELLEKAEEAFEAGDEESLRLLLTIIQILLYAVRIIYLAQQMNDEETTKRVRELMEKAFEANEAGDEESLRLLLTIIQILLYAVQIIILAQEMNDEETTKRVRELMEKAFEANEAGDEESLRLLLLIIQILLYAVQIIILAQEMNDEETTKRVRELMEKAFEANEAGDEESLKELLLQIIHLLYRVRSS

SEQ ID NO: 1671 - protein, 219 aa, synthetic construct
  REGION 1..219: note = Synthetic
DELFVKALSLILLVLTLAKKNNDEETTREAKETSRQLFEAARNGDFEQLQIIFLMVQALLYIQLVLEKAKRNNDEETTREAKETSRQLFEAARNGDFEQLQIIFLMVQALWYIQLVLEKAKRNNDEETTREAKETSRQLFEAARNGDFEQLRIIFLMVQALWYIQLVLEKAKRNNDEETTREAKETSRQLFEAARNGDYRELLEIFFFVLLLLEKQRYS

SEQ ID NO: 1672 - protein, 192 aa, synthetic construct
  REGION 1..192: note = Synthetic
SEFTEVLIILLLVLYLAEELGDEELRRLIEEMIRRVEEIRKRGDYEKAQRLSELAKVALLLLQVFKYAKELGDEELLRLIQEMIERVLEIIKRGDYEKAQRLSELAKVALLLLQVFKYAKELGDEELLRLIQEMIERVLEIIKRGDYEKAQRLSELAHIALLLLRAFKVALELGDEELLKHIQRRIEEVLEI

SEQ ID NO: 1673 - protein, 192 aa, synthetic construct
  REGION 1..192: note = Synthetic
SKFVEVLIILLLVLYLADELGDEELRRLIREMIERVREIIKRGDYEKAQRLSELAKVALLLLQVFKYAKELGDEELLRLIQEMIERVLEIIKRGDYEKAQRLSELAKVALLLLQVFKYAKELGDEELLRLIQEMIERVLEIIKRGDYEKAQRLSEYAQQALSILILFKTAKELGDEELLRTIQRLIERVLES

SEQ ID NO: 1674 - protein, 249 aa, synthetic construct
  REGION 1..249: note = Synthetic
DELDRLLLHALRLAVEIRHLAREISRLDPEFARQVLETAQEMREEVKKVKQENDPEKLRLIILLLRAALLAVLIWLLALEISRLDPEFARQVLETAQEMLEEVKKVKQENDPEKLRLIILLLRAALLAVLIWLLALEISRLDPEFARQVLETAQEMLEEVKKVKQENDPEKLRLIILLLRAALLAVLIWLLALEISRLDPEFARQVLETAQEMLEEVKKVKQENDPEKLREILHRLELALLEVRIFLEL

SEQ ID NO: 1675 - protein, 249 aa, synthetic construct
  REGION 1..249: note = Synthetic
SELDHLLLHARYLAEEIKILAKEISKLDPEFARQVLETAQEMLEEVKKVKQENDPEKLRLIILLLRAALLAVLIWLLALEISRLDPEFARQVLETAQEMLEEVKKVKQENDPEKLRLIILLLRAALLAVLIWLLALEISRLDPEFARQVLETAQEMLEEVKKVKQENDPEKLRLIILLLRAALLAVLIWLLALEISRLDPEFARQVLETAQEMLEEVKKVKQENDPEKLLEIILKLLFALLQVEIFLLQ

SEQ ID NO: 1676 - protein, 238 aa, synthetic construct
  REGION 1..238: note = Synthetic
DDRALQLEALVRILILRMRRLLEQTGDPTAQEALEFLQEILERVRRAKSMEEIQEYLKAAILFALVVELYLKMKRLLEQTGDPTAQEALEFLQEILERVRRAKSMEEIQEYLKAAILFALVVELYLKMKRLLEQTGDPTAQEALEFLQEILERVRRAKSMEEIQEYLKAAILFALVVELYLKMKRLLEQTGDPRAQEALEYLQEILELVRRAKSMEKIIRLLESAFLFARVVEIDLRS

SEQ ID NO: 1677 - protein, 222 aa, synthetic construct
  REGION 1..222: note = Synthetic
DEFEELLLHLLYLAVRLHLLAKRANDEEYRRTAQELKERAREVSQEGDPEKLKLLILIARLVLLAILLLLLAKRANDEEYSRTAQELMERAREVSQEGDPEKLKLLILIARLVLLAILLLLLAKRANDEEYSRTAQELMERAREVSQEGDPEKLKLLILIARLVLLAILLLLLAKRANDEEYSRTAQELMERAREVSQEGDPRKLRELILEAYVILERIRLL

SEQ ID NO: 1678 - protein, 250 aa, synthetic construct
  REGION 1..250: note = Synthetic
DEIAIKIRQLLLEIEILLRRIKQQGNYEEMKELKELFEELVELLRQALQNGDEESLRFVYIAVQILLLLAQIIILLRKIKQQGNYEEMKELKELFEELVELLRQALQNGDEESLRFVYIAVQILLLLAQIIILLRKIKQQGNYEEMKELKELFEELVELLRQALQNGDEESLRFVYIAVQILLLLAQIIILLRKIKQQGNYEEMKELKELFEELVELLRQALQNGDEKLLRQVLIQVRILLLQAELILLS

SEQ ID NO: 1679 - protein, 253 aa, synthetic construct
  REGION 1..253: note = Synthetic
DEIELLIARALSLLYEAYFLALRLKQAGNEEIAKRILEILKQLEEKLMQATENGDPETVRLVLEIAEALSLLMQAFLLALELKEAGNVEIAKRILEILKQLLEKLMQATENGDPETVRLVLEIAEALSLLMQAFLLALELKEAGNVEIAKRILEILKQLLEKLMQATENGDPETVRLVLEIAEALSLLMQAFLLALELKEAGNVEIAKRILEILKQLLEKLMQATENGDPETVHHVLEIARRLSVEMRLFLLS

SEQ ID NO: 1680 - protein, 253 aa, synthetic construct
  REGION 1..253: note = Synthetic
DELEELINRALLLLLEAEKLARELKEAGNVEIAKRILEILKQLREKLMQATENGDPETVRLVLEIAEALSLLMQAFLLALELKEAGNVEIAKRILEILKQLLEKLMQATENGDPETVRLVLEIAEALSLLMQAFLLALELKEAGNVEIAKRILEILKQLLEKLMQATENGDPETVRLVLLIAEALSFLMQAFLLALELKEAGNVEIAKRILEILKQLLEKLMQATENGDPLLVYEVLLIAISLSYRMEEILRS

SEQ ID NO: 1681 - protein, 219 aa, synthetic construct
  REGION 1..219: note = Synthetic
DELFARAFYLAFLLHLIAKRLGDEESLRIVEQLLERLKEIYKRNDLEKIRQLILMLQALLLALRLFLTAKELGDEESLRIVEQLLERLKEIVKRNDLEKIRQLILMLQALLLALELFQTAKELGDEESLRIVEQLLERLKEIVKRNDLEKIRQLILMLQALLLALELFQTAKELGDEESLRIVEQLLERLKEIVKRNDLEKIRQLLELLLRLLYRLEYS

SEQ ID NO: 1682 - protein, 219 aa, synthetic construct
  REGION 1..219: note = Synthetic
SRLFLQAFKLAILLEVLARLLGDEESLRIVEQLYERLKEIYKRNDLEKIRQLILMLQALLLALQLFQLARELGDEESLRIVEQLLERLKEIVKRNDLEKIRQLILMLQALLLALELFQTAKELGDEESLRIVEQLLERLKEIVKRNDLEKIRQLILMLKALLLALELFQTAKELGDEESLRIVEQLLERLKEIVKRNDLEKIRQLLRLLLELLVELRLS

SEQ ID NO: 1683 - protein, 225 aa, synthetic construct
  REGION 1..225: note = Synthetic
DEHEKLLFELLQLILRAELLFHLSGDEEILQLVREMKELVERAKQSGDPETLKFIFLLVELLWLIAEAILLYKQSGDEEILQLVREMKELVERAKQSGDPETLKFIFLLVELLWLIAEAILLYKQSGDEEILQLVREMKELVERAKQSGDPETLKFIFLLVELLWLIAEAILLYKQSGDEEILQLVREMKELVERAKQSGDPETLRRIFLEVEDLWKRAHTVFEQ

SEQ ID NO: 1684 - protein, 219 aa, synthetic construct
  REGION 1..219: note = Synthetic
DRLLDEIFTIAYFIEYLMRRLGSEEFKELLQQLIELARQAQKTGDPEEVKLVLLLVKIVETALRIQILMEELGSEEFKELLQQLIELARQASKTGDPEEVKLVLLLVKIVYTALRIQELMERLGSEEFKELLQQLIELARQASKTGDPEEVKLVLLLVKIVYTALRIQELMERLGSEEFKELLQQLIELARQASKTGDPREVQHVLLLVIEVYLRLELS

SEQ ID NO: 1685 - protein, 222 aa, synthetic construct
  REGION 1..222: note = Synthetic
SEKEHRLLHARYLIEEARLFAEELGNEESLEEIRQILRQFQEAKETGNPEEIEKVLRLVEAILLILKAMLFAKQLGNEESLEEIRQILRQFQEAKETGNPEEIEKVLRLVEAILLILKAMLFAKQLGNEESLEEIRQILRQFQEAKETGNPEEIEKVLLLVEAILLILKAMLFAKQLGNEESLEEIRQILRQFQEAKETGNPREIREVLIQVRQILLHLKTH

SEQ ID NO: 1686 - protein, 222 aa, synthetic construct
  REGION 1..222: note = Synthetic
SEKEYLLTKAELLILLAETFARHLGNEESLEEIRQILRQFQEAKETGNPEEIEKVLRLVEAILLILQAMLLALLLGNEESLEEIRQILRQFQEAKETGNPEEIEKVLRLVEAILLILKAMYFALRLGNEESLEEIRQILRQFQEAKETGNPKEILKVLLLVKAILLILKAMLFAKQLGNEESLEEIRQILRQFQEAKETGNPEEILRVYILVLEILYHLELL

SEQ ID NO: 1687 - protein, 241 aa, synthetic construct
  REGION 1..241: note = Synthetic
SKMERLADEIRLIALEIEYSARVIKQEAGDPRAEELVQQALELVRKAVESTDEEEIKMLLLAVRIILIAAKILILAQRIKEQAGDPRAEELVQQALELVRKAVESTDEEEIKMLLLAVRIILIAAKILILAQRIKEQAGDPRAEELVQQALELVRKAVESTDEEEIKMLLLAVRIILIAAKILILAQRIKEQAGDPRAEELVQQALELVRKAVESTDEKEIRHLLYQVLIILLLAFRLLLS

SEQ ID NO: 1688 - protein, 219 aa, synthetic construct
  REGION 1..219: note = Synthetic
SELETKLRILIYIVELLARLAGDEELRKLVEEVLELVQRAIETGDEEKLRKAILIAILIRLIAIVLLMAQKAGDEELRKLVEEVLELVQRAIETGDEEKLRKAILIAILIILIAIVLLMAQKAGDEELRKLVEEVLELVQRAIETGDREKLLLAIDIAYLIILIAIVLLMAQKAGDEELRKLVEEVLELVQRAIETGDQRLLLEAIALALYIERLAERL

SEQ ID NO: 1689 - protein, 253 aa, synthetic construct
  REGION 1..253: note = Synthetic
DELRELELHVHRLIHQARIFAERIRQLGDEEFAQEVEELVEQISRLLKRAIQEGDPELLELASLIAKVLLLILLALLMAKKIRQLGDEEFAQEVEELVEQISRLLKRAIQEGDPELLELASLIAKVLLLILLALLMAKKIRQLGDEEFAQEVEELVEQISRLLKRAIQEGDPELLELASLIAKVLLLILLALLMAKKIRQLGDEEFAQEVEELVEQISRLLKRAIQEGDPHLLLEAFHEALKLLIELQQFLDS

SEQ ID NO: 1690 - protein, 253 aa, synthetic construct
  REGION 1..253: note = Synthetic
DELEHLRFEVKLLIQRAEYLARLIRRLGDEEFAQEVEELVEQISRLLKRAIQEGDPELLELASLIAKVLLLILLALLMAKKIRQLGDEEFAQEVEELVEQISRLLKRAIQEGDPELLELASLIAKVLLLILLALLMAKKIRQLGDEEFAQEVEELVEQISRLLKRAIQEGDPELLELASLIAKVLLLILLALLMAKKIRQLGDEEFAQEVEELVEQISRLLKRAIQEGDPQLLLHAYNFALRLLLLLREFLQR

SEQ ID NO: 1691 - protein, 253 aa, synthetic construct
  REGION 1..253: note = Synthetic
DELEELIAQVEYLIIRAEHMAKRIRQLGDEEFAQEVEELVEQISRLLKRAIQEGDPELLELASLIAKVLLLILLALLMAKKIRQLGDEEFAQEVEELVEQISRLLKRAIQEGDPELLELASLIAKVLLLILLALLMAKKIRQLGDEEFAQEVEELVEQISRLLKRAIQEGDPELLRLASLIAKVLLLILLALLMAKKIRQLGDEEFAQEVEELVEQISRLLKRAIQEGDPRLLIRAYVFALELLFELELLLRS

SEQ ID NO: 1692 - protein, 253 aa, synthetic construct
  REGION 1..253: note = Synthetic
SELEELRRHVYELILKARILAELIRLQGDEEFAQEVEELVEQISRLLKRAIQEGDPELLELASLIAKVLLLILLALLMALRIRELGDEEFAQEVEELVEQISRLLKRAIQEGDPELLELASLIAKVLLLILLALLMAKKIRQLGDEEFAQEVEELVEQISRLLKRAIQEGDPELLELASLIAKVLLLILLALLMAKKIRQLGDEEFAQEVEELVEQISRLLKRAIQEGDPELLHRAYILARRLLNILEENLLS

SEQ ID NO: 1693 - protein, 250 aa, synthetic construct
  REGION 1..250: note = Synthetic
DELELRIHTLIQIVHNLALIIQLNGDYEQAQQLRELVQRLLELLKKATETGDPRLVEWALLLLRILLLIALVLEMALEIQKEGDYEQAQQLRELVQRLLELLKKATETGDPRLVEWALLLLRILLLIALVLIMALEIQKEGDYEQAQQLRELVQRLLELLKKATETGDPRLVEWALKLLRILLLIALVLIMALEIQKEGDYEQAQQLRELVQRLLELLKKATETGDPRLVIKALVLLIELEERAHHLIRS

SEQ ID NO: 1694 - protein, 250 aa, synthetic construct
  REGION 1..250: note = Synthetic
DELEQRILQLIARVESLAREIQSHGDYEQAQQLRELVQRLLELLKKATETGDPRLVEWALLLLRILLLIALVLIMALEIQREGDYEQAQQLRELVQRLLELLKKATETGDPRLVEWALLLLRILLLIALVLIMALEIQKEGDYEQAQQLRELVQRLLELLKKATETGDPRLVEWALLLLRILLLIALVLIMALEIQKEGDYEQAQQLRELVQRLLELLKKATETGDPRLVRKAYRLLIRLLYRAIELLLS

SEQ ID NO: 1695 - protein, 250 aa, synthetic construct
  REGION 1..250: note = Synthetic
SELENRIFQLILLVHVLALYIQNEGDYEQAQQLRELVQRLLELLKKATETGDPRLVEWALLLLRILLLIALVLQMALEIQKEGDYEQAQQLRELVQRLLELLKKATETGDPRLVEWALLLLRILLLIALVLIMALEIQKEGDYEQAQQLRELVQRLLELLKKATETGDPRLVRWALILLRILLLIALVLIMALEIQKEGDYEQAQQLRELVQRLLELLKKATETGDPELVYKALELLLRLLNRAEKLIDS

SEQ ID NO: 1696 - protein, 250 aa, synthetic construct
  REGION 1..250: note = Synthetic
SELEREIKHLILVVRVLAHLIQLHGDYEQAQQLRELVQRLLELLKKATETGDPRLVEWALLLLRILLLIALVLLLALRIQLHGDYEQAQQLRELVQRLLELLKKATETGDPRLVEWALLLLRILLLIALVLQMALEIQKEGDYEQAQQLRELVQRLLELLKKATETGDPRLVDFALLLLEILLLIALVLIMALEIQKEGDYEQAQQLRELVQRLLELLKKATETGDPRLVRKAYELLIRLRLHAFDLLSS

SEQ ID NO: 1697 - protein, 225 aa, synthetic construct
  REGION 1..225: note = Synthetic
NEVELLVHRALQYAKLILQIAKELGDEEIFESAREIKEEVLRALQAGDLKTVQIVLLVAQAIYYAALILQIAKELGDEEIFESAREIMEEVLRALQAGDLKTVQIVLLVAQAIYYAALILQIAKELGDEEIFESAREIMEEVLRALQAGDLKTVQIVLLVAQAIYYAALILQIAKELGDEEIFESAREIMEDVLRALQAGDLELVRIVLLDAQALFFEAESRKRR

SEQ ID NO: 1698 - protein, 241 aa, synthetic construct
  REGION 1..241: note = Synthetic
DDMETLALRIKIFANHIKKLAERIKEQAGDPRAEELVQQALELVRKAVESTDEEEIKMLLLAVRIILIAAKILILAQRIKEQAGDPRAEELVQQALELVRKAVESTDEEEIKMLLLAVRIILIAAKILILAQRIKEQAGDPRAEELVQQALELVRKAVESTDEEEIKMLLLAVRIILIAAKILILAQRIKEQAGDPRAEELVQQALELVRKAVESTDEIEIRQLLLLVLIILNEAERLVKS

SEQ ID NO: 1699 - protein, 219 aa, synthetic construct
  REGION 1..219: note = Synthetic
DELELRALILLLELLLFILRAGDEELRENSQRLLEILKRAQKQGDPEQIEEVMKQAKALILLAELLQWIREAGDEELRENWQRLLEILKRAQKQGDPEQIEEVMKQAKALILLAELLQWIREAGDEELRENWQRLLEILKRAQKQGDPEQIEEVMKQAKALILLAELLQWIREAGDEELRENWQRLLEILKRAQKQGDPRQIEHVISTAEYLIDQARLL

SEQ ID NO: 1700 - protein, 219 aa, synthetic construct
  REGION 1..219: note = Synthetic
DERELRALHLLYELERWIREAGDEELRENWQRLREILKRAQKQGDPEQIEEVMKQAKALILLAELLQWIREAGDEELRENWQRLLEILKRAQKQGDPEQIEEVMKQAKALILLAELLQWIREAGDEELRENWQRLLEILKRAQKQGDPEQIEEVMKQAKALILLAELLQWIREAGDEELREHWQRLLEILKRAQKQGDPFQIEFVINIARALIVLARNL

SEQ ID NO: 1701 - protein, 233 aa, synthetic construct
  REGION 1..233: note = Synthetic
DELEEELRRHLIEIEFLIEQAKKQGDEEVIRLLQKASEELLRAAETGDPRQIETALLIAQLVRQMFEINQLIEKAKKQGDEEVIRLLQKASEELLRAAETGDPRQIETALLIAQLVRQMFEINQLIEKAKKQGDEEVIRLLQKASEELLRAAETGDPRQIETALLIAQLVRQMFEINQLIEKAKKQGDEEVIRHLQKASEELLRAAETGDPREIDRALFIAKLVRTLFERNQS

SEQ ID NO: 1702 - protein, 220 aa, synthetic construct
  REGION 1..220: note = Synthetic
SEELVVKIASIIYEAHYLAELLGDEENLETVRKLLEELKRIQETGDPEKVRFMLLVAQIFLIILLAYHLAKQLGDEENLETVRKLLEELKRIQETGDPEKVRFMLLVAQIFYIILLAYQLAKQLGDEENLETVRKLLEELKRIQETGDPEKVEFMLFVAQIFYIILLAYQLAKQLGDEENLETVRKLLEELKRIQETGDPRKVIEMLFKALLFFTKLKRS

SEQ ID NO: 1703 - protein, 220 aa, synthetic construct
  REGION 1..220: note = Synthetic
SQELVAQILSIILKARRLAKQLGDEENLETVRKLLEELKRIEETGDPEKVRFMLLVAQIFYIILLAYQLAKQLGDEENLETVRKLLEELKRIQETGDPEKVRFMLLVAQIFYIILLAYQLAKQLGDEENLETVRKLLEELKRIQETGDPEKVRFMLLVAQIFYIILLAYQLAKQLGDEENLETVRKLLEELKRIQETGDPHRVEQMLLEARYFYLQLKLS

SEQ ID NO: 1704 - protein, 220 aa, synthetic construct
  REGION 1..220: note = Synthetic
FEELVRRIFEIINRAYALAYLLGDEENLETVRKLLEELKRIEETGDPEKVRFMLLVAQIFFIILQAYELAKRLGDEENLETVRKLLEELKRIQETGDPEKVRFMLLVAQIFYIILLAYQLAKQLGDEENLETVRKLLEELKRIQETGDPEKVRFMLLVAQIFYIILLAYQLAKQLGDEENLETVRKLLEELKRIQETGDPRKVRRMLLEALEFFLRLKTS

SEQ ID NO: 1705 - protein, 220 aa, synthetic construct
  REGION 1..220: note = Synthetic
FERLVNRIQSIIFEAELLARHLGDEENLETVRKLLEELKRIEETGDPEKVRFMLLVAQIFLIILLAYILAKQLGDEENLETVRKLLEELKRIQETGDPRKVYFMLLVAQIFYIILQAYQLAKQLGDEENLETVRKLLEELKRIQETGDPRKVLFMLYVAQIFYIILLAYQLAKQLGDEENLETVRKLLEELKRIQETGDPQKVLEMLIKAEHFYRELRLY

SEQ ID NO: 1706 - protein, 219 aa, synthetic construct
  REGION 1..219: note = Synthetic
DELLHEIESIIHRLENIARLLGDEENLQIVRELRERLKRISEAGDFEKAQALLLLVQIMLIILLLYKIAQELGDEENLQIVRELRERLKRISEAGDFEKAQALLLLVQIMLIILLLYKIAQELGDEENLQIVRELRERLKRISEAGDFEKAQALLLLVQIMLIILLLYKIAQELGDEENLQIVRELRERLKRISEAGDFEKAEQLLYEVRITLLELEQS

SEQ ID NO: 1707 - protein, 219 aa, synthetic construct
  REGION 1..219: note = Synthetic
DDLLLEIELIILSLEYIAQRLGDEENLQIVRELRERLKRISEAGDFEKAQALLLLVQIMLIILRLYHIAQRLGDEENLQIVRELRERLKRISEAGDFEKAHALLLLVQIMLIILLLYKIAQELGDEENLQIVRELRERLKRISEAGDREKAYALLLLVQIMLIILLLYKIAQELGDEENLQIVRELRERLKRISEAGDTEKAAQLLALVLRMLFRLEKY

SEQ ID NO: 1708 - protein, 210 aa, synthetic construct
  REGION 1..210: note = Synthetic
DEELLRLLLRILYLLRLAELAGVDEELFQEIRKLMERAKEAAENGDPEKVRLLTLLAQILFLLAQAKIAGVDEELFQEIRKLMERAKEAAENGDPEKVRLLTLLAQILFLLAQAKIAGVDEELFQEIRKLMERAKEAAENGDPEKVRLLTLLAQILFLLAQAKIAGVDEELFQFIRELMERAKEAAENGDPYEVHALTWLAQQTFEKARS

SEQ ID NO: 1709 - protein, 241 aa, synthetic construct
  REGION 1..241: note = Synthetic
DEMERLALEIQHFAHQIRELAQRIKEQAGDPRAEELVQQALELVRKAVESTDEEEIKMLLLAVRIILIAAKILILAQRIKEQAGDPRAEELVQQALELVRKAVESTDEEEIKMLLLAVRIILIAAKILILAQRIKEQAGDPRAEELVQQALELVRKAVESTDEEEIKMLLLAVRIILIAAKILILAQRIKEQAGDPRAEELVQQALELVRKAVESTDEEEIKKLLLRVEFILIEARLLILS

SEQ ID NO: 1710 - protein, 210 aa, synthetic construct
  REGION 1..210: note = Synthetic
DERLKRLLLQITILLHRARLAGVDEELFQEIRKLLERAREAAENGDPEKVRLLTLLAQILFLLAQAKIAGVDEELFQEIRKLMERAKEAAENGDPEKVRLLTLLAQILFLLAQAKIAGVDEELFQEIRKLMERAKEAAENGDPEKVRLLTLLAQILFLLAQAKIAGVDEEHFQQIRKLMERAKEAAENGDPKKVRELTLRAIIIFYIARH

SEQ ID NO: 1711 - protein, 241 aa, synthetic construct
  REGION 1..241: note = Synthetic
SELERLLYEVEIELHHAEELAQLATDEKFQQELRETAEEVKELIRQAKQATDPEEIRLLVLLALVMIQLLIALYLAQLATDEKFQQELRETAEEVKELIRQAKQATDPEEIRLLVLLALVMIQLLIALYLAQLATDEKFQQELRETAEEVKELIRQAKQATDPEEIRLLVLLALVMIQLLIALYLAQLATDHIVQEYLRRTAETVKELIRQAKQATDPREIRILVLLAYVFILLLILLFRL

SEQ ID NO: 1712 - protein, 226 aa, synthetic construct
  REGION 1..226: note = Synthetic
DELQVLQEIQRAIVEFLYMYSVAERLGDKELAEKIRQLTEQLEEIFERVEKSGDEETLRLALVLAQIAQAIVEFLYMYSVAERLGDKELAEKIRQLTEQLEEIFERVKKSGDEETLRLALVLAQIAQAIVEFLYMYSVAERLGDKELAEKIRQLTEQLEEIFERVKKSGDEKTLELALLLAEIAQRIVEFLYMYSVAERLGDKERAERIRQLTEDLEHTFEKLKKS

SEQ ID NO: 1713 - protein, 226 aa, synthetic construct
  REGION 1..226: note = Synthetic
RDSEVLLHILIALLLFKNMYETAERLGDKELAEKIRQLTEQLEEIYERVHKSGDEETLRLALVLAQIAQAIVEFLRMYSVAERLGDKELAEKIRQLTEQLEEIFERVKKSGDEETLRLALVLAQIAQAIVEFLYMYSVAERLGDKELAEKIRQLTEQLEEIFERVKKSGDEETLRLALKLARIAQLIVEFLYEYSVAERLGDKHLAHFIERITKTLIELFEETKKS

SEQ ID NO: 1714 - protein, 268 aa, synthetic construct
  REGION 1..268: note = Synthetic
DDLEFLLLVAFHAYFLAEIVLQKAERAGDPELIRRAKEILEKAEELIEQLKEMVEQGDRKKAFLISLVVVAIIAYIFALEVLIQAQQAGDPELIRRAKEILEKAEELIEQLIEMTRQGDEEKAKLISLVVVAIIAYIFALEVLIKAQQAGDPELIRRAKEILEKAEELIEQLIEMTRQGDLEKAKLISLVVVAIIAYILALEVLILAQQAGDPELIRRAKEILERAEELIEQLIEMTRQGDLQKAEEISHKVEALRSYIHRLIERILH

SEQ ID NO: 1715 - protein, 272 aa, synthetic construct
  REGION 1..272: note = Synthetic
SERLQLALEARIYAYRVEIIHEFIRILGGSEEIQKLIRELLQLAIELVREIVEAYKRGDEEKLKMALLAVSAVLYAALVLLISLFIIIAGGSEEIQKLIRELLQLAIELVREIVEALKRGDERKLQLALLAVSAVLYAALVLLISLQIRRAGGSEEIQKLIRELLQLAIELVREIVEALKRGDLEKLLLALLAVSAVLNAALVLLISLQIREAGGSEEIQKLIRELLQLAIELVREIVEALKRGDEEKLIQALAEVYSVLLFAENLLYRLES

SEQ ID NO: 1716 - protein, 272 aa, synthetic construct
  REGION 1..272: note = Synthetic
SELEELAHRAKHYAFQVRLIFEKIRKAGGSEEIQKLIRELLQLAIELVREIVEALKRGDEEKLKMALLAVSAVLYAALVLLISLQIREAGGSEEIQKLIRELLQLAIELVREIVEALKRGDEEKLKMALLAVSAVLYAALVLLISLQIREAGGSEEIQKLIRELLQLAIELVREIVEALKRGDEEKLRMALLAVSAVLYAALVLLISLQIREAGGSEEIQKLIRELLQLAIELVREIVEALKRGDREKLLEALVLVQLVLLEAEFLLESLQR

SEQ ID NO: 1717 - protein, 298 aa, synthetic construct
  REGION 1..298: note = Synthetic
DEREVEILRIVLEIRHLLLKVLLLIRQYFPEEEAKRLIESAKELLQEAEEVAKKASEMQQQGDEEQFEILKRIIEIILLVAKIALLLLKVLLLIRQYFPEEEAKRLIESAKELLQEAIEVAKKASEMQQQGDEEQFEILKRIIEIILLVAKIALLLLKVLLLIRQYFPEEEAKRLIESAKELLQEAIEVAKKASEMQQQGDEEQFEILKRIIEIILLVAKIALLLLKVLLLIRQYFPEEEAKRLIESAKELLQEAIEVAKKASEMQQQGDEEQFKRLLRIILRILFHAQAALYILKRS

SEQ ID NO: 1718 - protein, 272 aa, synthetic construct
  REGION 1..272: note = Synthetic
DELETIAFEVRRILKLALLILIQVFKLVTSPETQELIRKFKEMLELVLELLKEATQRGDERLFRLALIAARVILLLALALLILIQVFKLVTSPETQELIRKFKEMLELVLELLKEATQRGDERLFRLALIAARVILLLALALLILIQVFKLVTSPETQELIRKFKEMLELVLELLKEATQRGDERLFRLALIAARVILLLALALLILIQVFKLVTSPETQELIRKFKEMLELVLEVLKEATQRGDESLFRRALLLAFIILHEALILLLEIRS

SEQ ID NO: 1719 - protein, 272 aa, synthetic construct
  REGION 1..272: note = Synthetic
DELELIAQEVRLILEKAEHTLRQVFKLVTSPETQELIRKFKEMLELVLELLKEATQRGDERLFRLALIAARVILLLALALLILIQVFKLVTSPETQELIRKFKEMLELVLELLKEATQRGDERLFRLALIAARVILLLALALLILIQVFKLVTSPETQELIRKFKEMLELVLELLKEATQRGDHHLFELALIAALVILLLALALLILIQVFKLVTSPETQELIRKFKEMLELVLELLKEATQRGDYQLFIKAFSLAFQILSEARLLLQRIQE

SEQ ID NO: 1720 - protein, 241 aa, synthetic construct
  REGION 1..241: note = Synthetic
DEMEELATEIESIANEIYIVAHRILKQAGDPRAEELVQQALELVRKAVESTDEEEIKMLLLAVRIILIAAKILILAQRIKEQAGDPRAEELVQQALELVRKAVESTDEEEIKMLLLAVRIILIAAKILILAQRIKEQAGDPRAEELVQQALELVRKAVESTDEEEIKMLLLAVRIILIAAKILILAQRIKEQAGDPRAEELVQQALELVRKAVESTDEHEIHKLLLLVRIILLLAELLILS

SEQ ID NO: 1721 - protein, 273 aa, synthetic construct
  REGION 1..273: note = Synthetic
DEIEELFSRIENLSNELKLIVRELTRLFGNSPELQQEIKELLEIVRKALEMAQRALEENDEKQIRIAYLLVRIALLSALLLKLVLELTKLFGNSPELQQEIKELLEIVRKALEMAQRALEENDEKQIRIAYLLVRIALLSALLLKLVLELTKLFGNSPELQQEIKELLEIVRKALEMAQRALEENDEKQIRIAYLLVRIALLSALLLKLVLELTKLFGNSPELQQEIKELLEIVRKALEMAQRALEENDEQLIKEAFLLVLLAVILAKRLKIS

SEQ ID NO: 1722 - protein, 273 aa, synthetic construct
  REGION 1..273: note = Synthetic
DQIEYLFLEIHILSLRLRLNVQILTELFGNSPELQQEIKELLEIVRKALEMAQRALEENDEKQIRIAYLLVRIALLSALLLLIVYLLTLLFGNSPELQQEIKELLEIVRKALEMAQRALEENDEKQIRIAYLLVRIALLSALLLQLVYELRILFGNSPELQQEIKELLEIVRKALEMAQRALEENDEQQIHIAFLLVRIALLSALLLKLVLELTKLFGNSPELQQEIKELLEIVRKALEMAQRALEENDLHQIFRAYELVVHALLRAEELRLS

SEQ ID NO: 1723 - protein, 273 aa, synthetic construct
  REGION 1..273: note = Synthetic
DEIEQLFLQIRQLSELLLKLVLELTKLFGNSPELQQEIKELLEIVRKALEMAQRALEENDEKQIRIAYLLVRIALLSALLLKLVLELTKLFGNSPELQQEIKELLEIVRKALEMAQRALEENDEKQIRIAYLLVRIALLSALLLKLVLELTKLFGNSPELQQEIKELLEIVRKALEMAQRALEENDEKQIRIAYLLVRIALLSALLLKLVLELTKLFGNSPELQQEIKELLEIVRRALELAQKALEENDESLIKVAFNLVLYALARAELLKTS

SEQ ID NO: 1724 - protein, 285 aa, synthetic construct
  REGION 1..285: note = Synthetic
DEIRIRLRQILLEARSIVDEIEYTLERLRQIGVPEEDLEKIKEVAKKALELLKQAIELWAKDDERAEIAARLALMLVEAALIVAQILETLERLRQIGVPEEDLEKIKEVAKKALELLKQAIELWAKDDERAEIAARLALMLVEAALIVAQILETLERLRQIGVPEEDLEKIKEVAKKALELLKQAIELWAKDDERAEIAARLALMLVEAALIVAQILETLERLRQIGVPEEDLEKIKELAKKALELLKQAIELWAKDDERAERAAEIALIQVRIALLLARLLLLS

SEQ ID NO: 1725 - protein, 285 aa, synthetic construct
  REGION 1..285: note = Synthetic
DKVAAHLQVIFVRAREIVAQILETLERLRQIGVPEEDLEKIKEVAKKALELLKQALELWAKDDERAEIAARLALMLVEAALIVAQILETLERLRQIGVPEEDLEKIKEVAKKALELLKQAIELWAKDDERAEIAARLALMLVEAALIVAQILETLERLRQIGVPEEDLEKIKEVAKKALELLKQAIELWAKDDERAEIAARLALMLVEAALIVAQILETLERLRQIGVPEEDLEKIKEQAKEALEILKQAIELWAKDERRAELAAKYALLVVRIALTLARILETQ

SEQ ID NO: 1726 - protein, 285 aa, synthetic construct
  REGION 1..285: note = Synthetic
DEIRLRLEHILVRARRIVAQILETLERLRQIGVPEEDLEKIKEVAKKALELLKQAIELWAKDDERAEIAARLALMLVEAALIVAQILETLERLRQIGVPEEDLEKIKEVAKKALELLKQAIELWAKDDERAEIAARLALMLVEAALIVAQILETLERLRQIGVPEEDLEKIKEVAKKALELLKQAIELWAKDDERAEIAARLALMLVEAALIVAQILETLERLRQIGVPEEDLEKIKEIAKKALELLKQAIELWAKDDRHAEFAARRALEYVRYALLRARTLEEL

SEQ ID NO: 1727 - protein, 285 aa, synthetic construct
  REGION 1..285: note = Synthetic
DEIRQRLRHILYKARLIVEFIELILEKLRQIGVPEEDLEKIKEVAKKALELLKQAIELWAKDDERAEIAARLALMLVEAALIVAQILETLERLRQIGVPEEDLEKIKEVAKKALELLKQAIELWAKDDERAEIAARLALMLVEAALIVAQILETLERLRQIGVPEEDLEKIKEVAKKALELLKQAIELWAKDDRRAEIAARLALMLVEAALIVAQILETLERLRQIGVPEEDLEKIKEVAKKALELLKQAIELWAKDLSRALEAAHEALLLVRLALIRARILRES

SEQ ID NO: 1728 - protein, 285 aa, synthetic construct
  REGION 1..285: note = Synthetic
AEIAERLRRMLEEARLIVERIKIILENLREIGVPEEDLEKIKEVAKKALELLKQAIELWAKDDERAEIAARLALMLVEAALIVAQILETLERLRQIGVPEEDLEKIKEVAKKALELLKQAIELWAKDDERAEIAARLALMLVEAALIVAQILETLERLRQIGVPEEDLEKIKEVAKKALELLKQAIELWAKDDERAEIAARLALMLVEAALIVAQILETLERLRQIGVPEEDLEKIKEVAKKALELLKQAIELWAKDDRRAERLAHRALIIVIKALLHAENLRVS

SEQ ID NO: 1729 - protein, 262 aa, synthetic construct
  REGION 1..262: note = Synthetic
DRLEELLAEAFRLFNLVHAILYQIIVLWPQAQESFEEASQTAREILEKVQRAVEEGDEEKIRLLILLLIALVLMAIVLLILTRIVLQWPQAQESFEEASQTAREIIEKVQRAVEEGDEEKIRLLILLLIALVLMAIVLLILTKIVQQWPQAQESFEEASQTAREIIEKVQRAVEEGDEEKIRLLILLLIALVLMAIVLLILTKIVQQWPQAQESFEEASQTAREIIEKVQRAVEEGDERKITELITLLKELVLRAESLLKQT

SEQ ID NO: 1730 - protein, 276 aa, synthetic construct
  REGION 1..276: note = Synthetic
DELEKLATEITELVLFVREILKLITQLDPDNPELREIIQRILELAEELRKEAQKAVEEGDKETLRLIKLALEILTLVAIVIYILTLITQLDPDNPELREIIQRILELAEELMKEAQKAVEEGDKETLRLIKLALEILTLVAIVIYILTLITQLDPDNPELREIIQRILELAEELMKEAQKAVEEGDKETLRLIKLALEILTLVAIVIYILTLITQLDPDNPELREIIQRILELAEELMKEAQKAVEEGDKEKLKQILRLLKLLTLIAELIFHQTRL

SEQ ID NO: 1731 - protein, 241 aa, synthetic construct
  REGION 1..241: note = Synthetic
IKMLLLAVRIIEIAHRIRVHASYILTLAGDPRAEELVQQALELVRKAVESTDEEEIKMLLLAVRIILIAAKILILAFEIKRKAGDPRAEELVQQALELVRKAVESTDEEEIKMLLLAVRIILIAAKILILAQRIKEQAGDPRAEELVQQALELVRKAVESTDEEEIKMLLLAVEIILIAAKILILAQRIKEQAGDPRAEELVQQALELVRKAVESTDEKEIRRLLALVYEILARAIQLVLS

SEQ ID NO: 1732 - protein, 276 aa, synthetic construct
  REGION 1..276: note = Synthetic
DELEELYVEIVRLVKIVIYILTLITQLDPDNPELREIIQRILELAEELRKEAKKAVEEGDKETLRLIKLALEILTLVAIVIYILTLITQLDPDNPELREIIQRILELAEELMKEAQKAVEEGDKETLRLIKLALEILTLVAIVIYILTLITQLDPDNPELREIIQRILELAEELMKEAQKAVEEGDKETLRLIKLALEILTLVAIVIYILTLITQLDPDNPELREIIQRILELAEELMKEAQKAVEEGDRLTLEEIILILLLLVHRARVIYERTLI

SEQ ID NO: 1733 - protein, 276 aa, synthetic construct
  REGION 1..276: note = Synthetic
SRLERLALEILELVLIVRSILTIIRILDPDNPELREIIQRILELAEELMKEAQKAVEEGDKETLRLIKLALEILTLVAIVILILTKITLLDPDNPELREIIQRILELAEELMKEAQKAVEEGDKETLRLIKLALEILTLVAIVIYILTLITLLDPDNPELREIIQRILELAEELMKEAQKAVEEGDRHTLRLIKLALRILTLVAIVIYILTLITQLDPDNPELREIIQRILELAEELMKEAQKAVEEGDDETLHEILLELYRLTERARTIYQRTLS

SEQ ID NO: 1734 - protein, 250 aa, synthetic construct
  REGION 1..250: note = Synthetic
DEIEILLLEILSVLLRVARLAKQLGDEEMREQVKELIQRAIELAQKLRETGDPRYKEMLEVLFLLARILYLLLLVAVLAKQLGDEEMIEQVKELIQRAIELAQKLRETGDPRYKEMLEVLFLLARILYLLLLVAVLAKQLGDEEMIEQVKELIQRAIELAQKLRETGDPRYKKMLEVLFLLARILYLLLLVAVLAKQLGDEEMIEQVKELIQRAIELAQKLRETGDPRYYRLLERLLTHARILYEELLES

SEQ ID NO: 1735 - protein, 257 aa, synthetic construct
  REGION 1..257: note = Synthetic
DDERQIENKIEIIAIEVKKNLKKLKQAGVDPEKLRQLEELIEEITKLAREASESGDEQQLRMVLILAQIVLLAAEVLKNLWKLKQAGVDPEKLRQLEELIEEITKLAREASESGDEQQLRMVLILAQIVLLAAEVLKNLWKLKQAGVDPEKLRQLEELIEEITKLAREASESGDEQQLRMVLILAQIVLLAAEVLKNLWKLKQAGVDPELLRQLEELIEEITKLAREASESGDEAELRRVLALAYYVLILAEALKQS

SEQ ID NO: 1736 - protein, 257 aa, synthetic construct
  REGION 1..257: note = Synthetic
DRMERIEHKIRSIAIEVELNLEELKKLGVDPEKLRQLEELIEEITKLAREASESGDEQQLRMVLILAQIVLLAAEVLKNLWKLKQAGVDPEKLRQLEELIEEITKLAREASESGDEQQLRMVLILAQIVLLAAEVLKNLWKLKQAGVDPEKLRQLEELIEEITKLAREASESGDEQQLRMVLILAQIVLLAAEVLKNLWKLKQAGVDPEKLRQLEELIEEITKLAREASESGDERELLEVLHLAREVLELAERLKNS

SEQ ID NO: 1737 - protein, 257 aa, synthetic construct
  REGION 1..257: note = Synthetic
LRMVLILEQIRELAHRVEAILNLLKELGVDPEKLRQLEELIEEITKLAREASESGDEQQLRMVLILAQIVLLAAEVLENLFKLKRAGVDPEKLRQLEELIEEITKLAREASESGDEQQLRMVLILAQIVLLAAEVLKNLWKLKQAGVDPEKLRQLEELIEEITKLAREASESGDEQQLRMVLILAQIVLLAAEVLKNLWKLKQAGVDPEKLRQLEELIEEITKLAREASESGDERQLKRVYQLARRVLLLAEELRIN

SEQ ID NO: 1738 - protein, 269 aa, synthetic construct
  REGION 1..269: note = Synthetic
DELLARAIHLLQIAETMIALVKRLLTDPEIRQELQELSELAKRLLELAHEAHQRGDEESIRLILLLIKAVILVLIALTMIALVKRLLTDPEIRQELQELSELAKRLLELAFEASQRGDEESIRLILLLIKAVILVLIALTMIALVKRLLTDPEIRQELQELSELAKRLLELAFEASQRGDEESIRLILLLIKAVILVLIALTMIALVKRLLTDPEIRQELQELSELAKRLLELAFEASQRGDEKLIRTIIQRIELVILYLELLTEEARL

SEQ ID NO: 1739 - protein, 269 aa, synthetic construct
  REGION 1..269: note = Synthetic
DELVLKALKLFVYALEMFVIVKRLLTDPEIRQELQELSELAKRLLELAFEASQRGDEESIRLILLLIKAVILVLIALTMIALVKRLLTDPEIRQELQELSELAKRLLELAFEASQRGDEESIRLILLLIKAVILVLIALTMIALVKRLLTDPEIRQELQELSELAKRLLELAFEASQRGDEESIRLILLLIKAVILVLIALTMIALVKRLLTDPEIRQELQELSELAKRLLELAFEASQRGDEESIRQILLEIQLVIYILEVLTRRAES

SEQ ID NO: 1740 - protein, 269 aa, synthetic construct
  REGION 1..269: note = Synthetic
DELVLRAIELLLIAREMIALVKRLLTDPEIRQELQELSELAKRLLELAFEASQRGDEESIRLILLLIKAVILVLIALTMIALVKRLLTDPEIRQELQELSELAKRLLELAFEASQRGDEESIRLILLLIKAVILVLIALTMIALVKRLLTDPEIRQELQELSELAKRLLELAFEASQRGDEESIRLILLLIKAVILVLIALTMIALVKRLLTDPEIRQRLQRLSELAKRLLELAFEASQRGDEDLIYEIIQLIIVVIQVLERTTMRALV

SEQ ID NO: 1741 - protein, 268 aa, synthetic construct
  REGION 1..268: note = Synthetic
DLELLLTRIETLVQEAEKLLEELLQRSTSPEIRELIKEAKESLKEVLELAKQALREGDEELLRLALLLVLIIFLVMQAMLLLEELLQRSTSPEIRELIKEAKESLKEVLELAKQALREGDEELLRLALLLVLIIFLVMQAMLLLEELLQRSTSPEIRELIKEAKESLKEVLELAKQALREGDEELLRLALLLVLIIFLVMQAMLLLEELLQRSTSPEIRELIKEAKELLKEVLELAKQALREGDERRLRYALILVLVIFLLMLLMLLN

SEQ ID NO: 1742 - protein, 241 aa, synthetic construct
  REGION 1..241: note = Synthetic
IKMLLLAERIREIALEIESAAYEILRQAGDPRAEELVQQALELVRKAVESTDEEEIKMLLLAVRIILIAAKILILAFRIKKQAGDPRAEELVQQALELVRKAVESTDEEEIKMLLLAVRIILIAAKILILAQRIKEQAGDPRAEELVQQALELVRKAVESTDEEEIKMLLLAVRIILIAAKILILAQRIKEQAGDPRAEELVQQALELVRKAVESTDEREILQLLLLVLQILLDAQRLLLS

SEQ ID NO: 1743 - protein, 268 aa, synthetic construct
  REGION 1..268: note = Synthetic
DLETILYKIRELVRQAMLLLEELLQRSTSPEIRELIKEAKESLKEVLELAKQALREGDEELLRLALLLVLIIFLVMQAMLLLEELLQRSTSPEIRELIKEAKESLKEVLELAKQALREGDEELLRLALLLVLIIFLVMQAMLLLEELLQRSTSPEIRELIKEAKESLKEVLELAKQALREGDEELLRLALLLVLIIFLVMQAMLLLEELLQRSTSPEIRELIKEAKELLKEVLELAKQALREGDEEKLRLALILVRIIFLLMLYMLHS

SEQ ID NO: 1744 - protein, 269 aa, synthetic construct
  REGION 1..269: note = Synthetic
DELEELLLKIFSIFTEILIVLLRLRHVYTSPEIQEQVEQITRSAKRMLQKAIEAFEEGDKETVELALLLLKILLLFVKILEILQRLKETYTSPEIQEQVEQITRSAKRMLQKAIEAFEEGDKETVELALLLLKILLLFVKILEILQRLKETYTSPEIQEQVEQITRSAKRMLQKAIEAFEEGDKETVELALLLLKILLLFVKILEILQRLKETYTSPEIQEQVEQITRSAKRLLQKAIEAFEEGDKRLVHNALLYLKALLLLVRVLLLS

SEQ ID NO: 1745 - protein, 269 aa, synthetic construct
  REGION 1..269: note = Synthetic
SELEELLQRIREIFLQIEIILERLKRIYTSPEIQEQVEQITRSAKRMLQKAIEAFEEGDKETVELALLLLKILLLFVKILEILQRLKETYTSPEIQEQVEQITRSAKRMLQKAIEAFEEGDKETVELALLLLKILLLFVKILEILQRLKETYTSPEIQEQVEQITRSAKRMLQKAIEAFEEGDKETVELALLLLKILLLFVKILEILQRLKETYTSPEIQEQVEQITRSAKRMLQKAIEAFEEGDKHLVHQALLLLRLLLVFVEYLLSS

SEQ ID NO: 1746 - protein, 274 aa, synthetic construct
  REGION 1..274: note = Synthetic
DELVTKIKFLIEFAELLIERLKERAGSQSTPIREQVEEILRQLKEMLQIALEALQEGDEKKLWLAYLVVRILLLFIQALLLIEELKERAGSQSTPIREQVEEILRQLKEMLQIALEALQEGDEKKLWLAYLVVRILLLFIQALLLIEELKERAGSQSTPIREQVEEILRQLKEMLQIALEALQEGDEKKLELAYLVVRILLLFIQALLLIEELKERAGSQSTPIREQVEEILRQLKEMLQIALEALQEGDEEKLYKAYLLVLYLLLFIELLLKL

SEQ ID NO: 1747 - protein, 268 aa, synthetic construct
  REGION 1..268: note = Synthetic
DHLERLTHEMREIARQATYYLIEALKAGDPELREFAQRILELLQELEEQVIEALRQGDEKKIRLLLQTVKMLLIAVQATYYLIEALKAGDPELREFAQRILELLQELTEQVIEALRQGDEKKIRLLLQTVKMLLIAVQATYYLIEALKAGDPELREFAQRILELLQELTEQVIEALRQGDEKKIRLLLQTVKMLLIAVQATYYLIEALKAGDPELREFAQRILELLQELTEQVIEALRQGDEERILKLLVLVLSLLLLVRIYYEKIES

SEQ ID NO: 1748 - protein, 268 aa, synthetic construct
  REGION 1..268: note = Synthetic
DELRRLVLRMEHIIIEAERLLKEALKAGDPELREFAQRILELLQELTEQVIEALRQGDEKKIRLLLQTVKMLLIAVQATYYLIEALKAGDPELREFAQRILELLQELTEQVIEALRQGDEKKIRLLLQTVKMLLIAVQATYYLIEALKAGDPELREFAQRILELLQELTEQVIEALRQGDEHKIRLLLLTVKMLLIAVQATYYLIEALKAGDPELREFAQRILELLQELTEQVIEALRQGDEERILRLLLLVLELLLQVRHEYEIVES

SEQ ID NO: 1749 - protein, 303 aa, synthetic construct
  REGION 1..303: note = Synthetic
EELERLELLYRIILQLVLEAEVILYLITHVNPDNPELRRLIQEILRQLEEMLEEAKKAVELFKRGNEQAEELLRLILLFVIILLLVAQAILILTRITELNPDNPELRRLIQEILRQLEEMLEEAKKAVELFKRGNEQAEELLRLILLFVIILLLVAQAILILTQITELNPDNPELRRLIQEILRQLEEMLEEAKKAVELFKRGNEQAEKLLQLILLFVRILLLVAQAILILTQITELNPDNPELRRLIQEILRQLEEMLEEAKKAVELFKRGNEQALELLLRILLEVLRLLYTARLLLELTQS

SEQ ID NO: 1750 - protein, 272 aa, synthetic construct
  REGION 1..272: note = Synthetic
DELEEIFYKALELFVRVFLLVLLVKRLSTSPEMREQIREILEELRQILEKLKQALREGDKEKLELLLILLYALLLIAQVTYLVILVLQLSTSPEMREQIREILEELRQILEKLKQALREGDKEKLELLLILLYALLLIAQVTYLVILVLQLSTSPEMREQIREILEELRQILEKLKQALREGDKEKLELLLILLYALLLIAQVTYLVILVLQLSTSPEMREQIREILEELRQILEKLKQALREGDKRKLRELLLLLEHLLQIAEQTYERILS

SEQ ID NO: 1751 - protein, 272 aa, synthetic construct
  REGION 1..272: note = Synthetic
DELELILIHAEVLITRVKLLVLQVERLSTSPEMREQIREILEELRQILEKLKQALREGDKEKLELLLILLYALLLIAQVTYLVILVLQLSTSPEMREQIREILEELRQILEKLKQALREGDKEKLELLLILLYALLLIAQVTYLVILVLQLSTSPEMREQIREILEELRQILEKLKQALREGDKRKLELLLILLYALLLIAQVTYLVILVLQLSTSPEMREQIREILEELRQILEKLKQALREGDTRKLNQLIAQLLYLLFEAELTYREILS

SEQ ID NO: 1752 - protein, 276 aa, synthetic construct
  REGION 1..276: note = Synthetic
DEEEETFNEIRLIILRAKRIMREVLQRNPDDEELRRVLQELMEQLQRLLEQAKEALERGDKETLKLILTLVKIILIIAEAILIMTEVLQRNPDDEELRRVLQELMEQLQRLLEQAKEALERGDKETLKLILTLVKIILIIAEAILIMTEVLQRNPDDEELRRVLQELMEQLQRLLEQAKEALERGDKETLKLILLLVKIILLIAEAILIMTEVLQRNPDDEELRRKLQELMEQLQRLLEQAKEALERGDRETLLHIYALVLSILLQARLILEETEV

SEQ ID NO: 1753 - protein, 210 aa, synthetic construct
  REGION 1..210: note = Synthetic
SELEELLVRIESIAREIEVTARQTGNMELAELAQEMVRRAKEATDEEELKLLLLVVQIILIAAKIFKTARETGNMELAELAQEMVRRAKEATDEEELKLLLLVVQIILIAAKIFKTARETGNMELAELAQEMVRRAKEATDEEELKLLLLVVQIILIAAKIFKTARETGNMELAELAQEMVRRAKEATDEEELYELLLIVLRILFKARRS

SEQ ID NO: 1754 - protein, 276 aa, synthetic construct
  REGION 1..276: note = Synthetic
DEEEYIFTEIVLIILRALRIMREVLQRNPDDEELRRVLQELREQLQRLREQAKEALERGDKETLKLILTLVKIILIIAEAILIMTEVLQRNPDDEELRRVLQELMEQLQRLLEQAKEALERGDKETLKLILTLVKIILIIAEAILIMTEVLQRNPDDEELRRVLQELMEQLQRLLEQAKEALERGDKETLKLILTLVKIILIIAEAILIMTEVLQRNPDDEELRRVLQELMEQLQRLLEQAKEALERGDKRTLRRILYLVLEILLRARLILHETES

SEQ ID NO: 1755 - protein, 276 aa, synthetic construct
  REGION 1..276: note = Synthetic
DELRRLFYEIELIIIRAELLMESVESLNPDDEELRRVLQELMEQLQRLLEQAKEALERGDKETLKLILTLVKIILIIAEAILIMTEVLQRNPDDEELRRVLQELMEQLQRLLEQAKEALERGDKETLKLILTLVKIILIIAEAILIMTEVLQRNPDDEELRRVLQELMEQLQRLLEQAKEALERGDKETLRLILLLVKIILVIAEAILIMTEVLQRNPDDEELRRRLQELMEQLQRLLEQAKEALERGDLETLLHIYALVLEILLLARVILERTEV

SEQ ID NO: 1756 - protein, 272 aa, synthetic construct
  REGION 1..272: note = Synthetic
DQQEQLILRILILVLFAREIARYLFEFLRTPEIREQVQLLLEVAKQILEEMRRAFEENDEETLKQLLQIAKILFFVAFALYIALYLFEFLRTPEIREQVQLLLEVAKQILEEMRRAFEENDEETLKQLLQIAKILYFVAFALYIALYLFEFLRTPEIREQVQLLLEVAKQILEEMRRAFEENDEETLHQLLIIARILYLVAFALYIALYLFEFLRTPEIREQVQLLLEVAKQILEEMRRAFEENDEETLRRLLERALSLFDHAFELYHRLYH

SEQ ID NO: 1757 - protein, 198 aa, synthetic construct
  REGION 1..198: note = Synthetic
SEREFLEDEVRLAIYKVEQIMSKLKRTGDDESIELLKELVRILLELLKQAQELNDEELLERILLFARVLFAIAQVFLIMSKLKRTGDDESIELLKELVRILLELLKQAQELNDEELLERILLFARVLFAIAQVFLIMSKLKRTGDDESIELLKELVRILLELLKQAQELNDERLLRRILLTALRLLVHALEDLLRSEE

SEQ ID NO: 1758 - protein, 198 aa, synthetic construct
  REGION 1..198: note = Synthetic
DERELIFETVRVAIKHVESIMRKLKRTGDDESIELLKELVRILLELLKQAQELNDEELLERILLFARVLYAIAQVFLIMSKLKRTGDDESIELLKELVRILLELLKQAQELNDEELLKRILRFALVLFAIAQVFLIMSKLKRTGDDESIELLKELVRILLELLKQAQELNDEELLREILLIALRLYLLAERFLQMSKL

SEQ ID NO: 1759 - protein, 253 aa, synthetic construct
  REGION 1..253: note = Synthetic
DDIRKQAEIFLRRALELALKIEEKATSPLVEQIVREIMEAIREAAQRIKNVDEEELRQVLILAQALFYLASALLLALKIEEKATSPLVEQIVREIMEAIREAAQRIKNVDEEELRQVLILAQALYYLASALLLALKIEEKATSPLVEQIVREIMEAIREAAQRIKNVDEEELKRVLTLAQALYFLASALLLALKIEEKATSPLVEQKVREIMEAIREAAQRIKNVDHEELLRVLVHAIYLVLLAETLLERLKS

SEQ ID NO: 1760 - protein, 272 aa, synthetic construct
  REGION 1..272: note = Synthetic
DEMEHLALEVLLLLLRAKELVKRIQEKATSPEIEEVAKRVLQILREIAETILQALKRGDEELLRMALLAALVALLVAEALLLVTRIQEKATSPEIEEVAKRVLQILREIAETILQALKRGDEELLRMALLAALVALLVAEALLLVTRIQEKATSPEIEEVAKRVLQILREIAETILQALKRGDEELLRMALLAALVALLVAEALLLVTRIQEKATSPEIEEVAKRVLQILREIAETILQALKRGDEHLLREAEVHARYALNLARYLLLVTEL

SEQ ID NO: 1761 - protein, 272 aa, synthetic construct
  REGION 1..272: note = Synthetic
DEERLLALRVEHLLTEAKLLVKRIQEKATSPEIEEVAKRVLQILREIAETILQALKRGDEELLRMALLAALVALLVAEALLLVTRIQEKATSPEIEEVAKRVLQILREIAETILQALKRGDEELLRMALLAALVALLVAEALLLVTRIQEKATSPEIEEVAKRVLQILREIAETILQALKRGDEELLRMALLAALVALLVAEALLLVTRIQEKATSPEIEEKAKRVLQILREIAETILQALKRGDDKLLFQALVLAHFALLQARSLLIITES

SEQ ID NO: 1762 - protein, 272 aa, synthetic construct
  REGION 1..272: note = Synthetic
DELEVLANRVRALVTEARNLVKRIQEKATSPEIEEVAKRVLQILREIAETILQALKRGDEELLRMALLAALVALLVAEALLLVTRIQEKATSPEIEEVAKRVLQILREIAETILQALKRGDEELLRMALLAALVALLVAEALLLVTRIQEKATSPEIEEVAKRVLQILREIAETILQALKRGDEELLRMALLAALVALLVAEALLLVTRIQEKATSPEIEERAKRVLQILREIAETILQALKRGDEELLYHAFAEALRALAIARLLLKKTRI

SEQ ID NO: 1763 - protein, 272 aa, synthetic construct
  REGION 1..272: note = Synthetic
DELEYLAAQVLHLVSEALLLVTRIQEKATSPEIEEVAKRVLQILREIRETILQALKRGDEELLRMALLAALVALLVAEALLLVTRIQEKATSPEIEEVAKRVLQILREIAETILQALKRGDEELLRMALLAALVALLVAEALLLVTRIQEKATSPEIEEVAKRVLQILREIAETILQALKRGDEELLRMALLAALVALLVAEALLLVTRIQEKATSPEIEERAKRVLQILREIAEQILQALKRGDERLLRLAVLLAFVALYIARYLLLLTES

SEQ ID NO: 1764 - protein, 210 aa, synthetic construct
  REGION 1..210: note = Synthetic
DEEEQLVTKAHLIVLRIRELAKKAGSMELMELAVELAQRAHNSTDEEELRLLLLVVEAIHIVLQIIVLAKKAGSMELMELAVELAQRAHNSTDEEELRLLLLVVEAIHIVLQIIVLAKKAGSMELMELAVELAQRAHNSTDEEELRLLLLVVEAIHIVLQIIVLAKKAGSMELMELAVELAQRAHNSTDEEELRRLLLLVEQILQRLEIS

SEQ ID NO: 1765 - protein, 272 aa, synthetic construct
  REGION 1..272: note = Synthetic
SRMERLAHEVKHLLREAEVLVETIQDNATSPEIEEVAKRVLQILREIAETILQALKRGDEELLRMALLAALVALLVAEALLLVTEIQQKATSPEIEEVAKRVLQILREIAETILQALKRGDEELLRMALLAALVALLVAEALLLVTRIQEKATSPEIEEVAKRVLQILREIAETILQALKRGDEELLRMALLAALVALLVAEALLLVTRIQEKATSPEIEEVAKRVLQILREIAETILQALKRGDEKLLRRALFLAFEALTIALLLLLLTEL

SEQ ID NO: 1766 - protein, 289 aa, synthetic construct
  REGION 1..289: note = Synthetic
DRLEELARRVEQYLQHARETARKIIRILQRLNMPPKFLEAVELIVEMAQKVAEFVSRALERGDEKLLRLALLAAQVLYYLAQAILTALQIIEILQRLNMPPKFLEAVELIVEMAQKVAEFVSRALERGDEKLLRLALLAAQVLYYLAQAILTALQIIEILQRLNMPPKFLEAVELIVEMAQKVAEFVSRALERGDEKLLRLALLAAQVLYYLAQAILTALQIIEILQRLNMPPKFLEAVELIVEMAQKVAEFVSRALERGDEKLLRRALQLARHLFLLARLILLELEIL

SEQ ID NO: 1767 - protein, 269 aa, synthetic construct
  REGION 1..269: note = Synthetic
VRLLEEAELLVLHAELILHRVRLNATDPEFQQMIEELIKSLQEVIEIARKALQAGDFELLKLVLLLALALLLVALALLILARVRRNATDPEFQQMIEELIKSLQEVIEIARKALQAGDFELLKLVLLLALALLLVALALLILARVRRNATDPEFQQMIEELIKSLQEVIEIARKALQAGDFELLKLVLLLALALLLVALALLILARVRRNATDPEFQQMIEELIKSLQEVIEIARKALQAGDHRLLNEVYLLALRLYVIALELLERARS

SEQ ID NO: 1768 - protein, 268 aa, synthetic construct
  REGION 1..268: note = Synthetic
SDERQLELEFELISYEIKILLEQLRLSGNPEMKEQVRELLELLREITELFREAVQRGDEEKIELALLNAKFLLISARILLYLVQLKRSGNPEMKEQVRELLELLREITELFREAVQRGDEEKIELALLNAKFLLISARILVYLVQLKQSGNPEMKEQVRELLELLREITELFREAVQRGDEEKIELALLNAEFLLISARILVYLVQLKQSGNPEMKEQVRELLELLREITELFREAVQRGDKEKILKALLLALKLLYRARHLVRQVES

SEQ ID NO: 1769 - protein, 268 aa, synthetic construct
  REGION 1..268: note = Synthetic
DELETLEIRFLQISYEIRHYLKQLKQSGNPEMKEQVRELLELLREITELFREAVQRGDEEKIELALLNAKFLLISARILVYLVQLKQSGNPEMKEQVRELLELLREITELFREAVQRGDEEKIELALLNAKFLLISARILVYLVQLKQSGNPEMKEQVRELLELLREITELFREAVQRGDEEKIELALLNAKFLLISARILVYLVQLKQSGNPEMKEQVRELLELLREITELFREAVQRGDERKIDHAFFLALHLLLRARELVHKVEN

SEQ ID NO: 1770 - protein, 270 aa, synthetic construct
  REGION 1..270: note = Synthetic
DNLEERSIELFVLMFRAEIYLETASRQATSPEVERLIEEAQELLRQALELIQKAKHVSEEQFKLLWLSAVLYVLMALALVFLAIASAQATSPEVERLIEEAQELLRQALELIQKAKHVSEEQFKLLWLSAVLYVLMALALVFLAIASAQATSPEVERLIEEAQELLRQALELIQKAKHVSEEQFKLLWLSAVLYVLMALALVFLAIASAQATSPEVEFLIEVAQELLRQALELIQKAKHVSEEQFKELWLEARVLVLSALSLVLDALRVA

SEQ ID NO: 1771 - protein, 269 aa, synthetic construct
  REGION 1..269: note = Synthetic
DRMRELLERAHEIAFQVEALIHVIRQRVTDPKFRETIEKLQEIAETAIQTVREALKRGDLEKARMALLAVRAVLIALRVLLLIWEIRQRVTDPKFRETIEKLQEIAETAIQTVWEAIKRGDLEKARMALLAVRAVLIALEVLLLIWEIRQRVTDPKFRETIEKLQEIAETAIQTVWEAIKRGDLEKARMALLAVRAVLIALEVLLLIWEIRQRVTDPKFRETIEKLQEIAETAIQLVWEAIKRGDERLAEQALLLVLIVLTILKYLLSS

SEQ ID NO: 1772 - protein, 269 aa, synthetic construct
  REGION 1..269: note = Synthetic
SELEEIYFQAHVVAIRVEDLIRKIRQRVTDPKFRETIEKLQEIAETAIQTVWEAIKRGDLEKARMALLAVRAVLIALEVLLLIWEIRQRVTDPKFRETIEKLQEIAETAIQTVWEAIKRGDLEKARMALLAVRAVLIALEVLLLIWEIRQRVTDPKFRETIEKLQEIAETAIQTVWEAIKRGDLEKARMALLAVRAVLIALEVLLLIWEIRQRVTDPKFREEIEKLQELAETAIQLVWEAIKRGDEALAEVALSIVLLVLDILRTLLRS

SEQ ID NO: 1773 - protein, 230 aa, synthetic construct
  REGION 1..230: note = Synthetic
DELEYKLQRVARELKETMQKSLELGDKETYQILRELSERAEQAIREGDEEQVRLLLLLAKLILVAVELKETMQKSLELGDKETYQILRELSERALQAIKEGDEEQVRLLLLLAKLILVAVELKETMQKSLELGDKETYQILRELSERALQAIKEGDEEQVRLLLLLAKLILVAVELKETMQKSLELGDETLFELLRLLSEEALQAIKEGDERLVRRLLYLAEVTLRAHEL

SEQ ID NO: 1774 - protein, 230 aa, synthetic construct
  REGION 1..230: note = Synthetic
DELEHRLKRVAVELKETMQKSLELGDKETYQILRELSERALQALKEGDEEQVRLLLLLAKLILVAVELKETMQKSLELGDKETYQILRELSERALQAIKEGDEEQVRLLLLLAKLILVAVELKETMQKSLELGDKETYQILRELSERALQAIKEGDEEQVRLLLLLAKLILVAVELKETMQKSLELGDHNSFEILRLLSRLALQAIKDGDEKVVRFLLLVAKLILRLVES

SEQ ID NO: 1775 - protein, 210 aa, synthetic construct
  REGION 1..210: note = Synthetic
DRLERLVLEAKQIVEQIEELAKKAGSMELMELAVELAQRAHNSTDEEELRLLLLVVEAIHIVLQIIVLAKKAGSMELMELAVELAQRAHNSTDEEELRLLLLVVEAIHIVLQIIVLAKKAGSMELMELAVELAQRAHNSTDEEELRLLLLVVEAIHIVLQIIVLAKKAGSMELMELAVELAQRAHNSTDEEELRKLLLQVRVIFFQLRVS

SEQ ID NO: 1776 - protein, 207 aa, synthetic construct
  REGION 1..207: note = Synthetic
DELRYHALQLALKVLLLARQNGQEEFEETVQEMFRRVEKAGDEEEIQWIILLLIALFLALEVLRLAKENGQEEFEETVQEMFRRVKKAGDEEEIQWIILLLIALFLALEVLRLAKENGQEEFEETVQEMFRRVKKAGDEEEIQWIILLLIALFLALEVLRLAKENGQEEFEETVQEMFRRVKKAGDEEEIRRIIYRLRQLLLELEIL

SEQ ID NO: 1777 - protein, 171 aa, synthetic construct
  REGION 1..171: note = Synthetic
DLEVKLAELFARIALRQAKEAGDFELYQLLLRLVQELIRMINLGDPEKAEILAKVVIALAWAVLALIQAKEAGDFELYQLLLRLVQELIRMINLGDPEKAEILAKVVIALAFAVLALIQAKEAGDFELYQLLLRLVQELIRMINLGDPEKAERLAHKVLSLAYEVLSLIRS

SEQ ID NO: 1778 - protein, 217 aa, synthetic construct
  REGION 1..217: note = Synthetic
SQVELAELDALAAIHLLERAGDEELSQILLEFLRILLELSKRGSDEMRKVAFVVLAIASAALAFIQLKYAGDEELSQILLEFLRILLELSKRGSDEMLKVAFVVLAIASAAHAFIQLKEAGDEELSQILLEFLRILLELSKRGSDEMREVAFVVLAIALAALAFIKLKEAGDEELSQILLEFLRILLELSKRGSHEMEEVAHEVLEIALRAESFIFS

SEQ ID NO: 1779 - protein, 218 aa, synthetic construct
  REGION 1..218: note = Synthetic
SVRELKVQLLLNLLESLIRHSGDEELSEIAKYALKTASEAIRTGDPELLEKARLLLQVVLLMFELKHLLELSGDEELSEIAKYALKTASEAIRTGDPKLLHRARLLLQVVLLMFELLELLRESGDEELSEIAKYALKTASEAIRTGDPRLLLKALRLLQVVLLMFELQRLLRESGDEELSEIAKYALKTASEAIRTGDPELLERALSLLRRVLELFHL

SEQ ID NO: 1780 - protein, 226 aa, synthetic construct
  REGION 1..226: note = Synthetic
SRIEELVNRILSIIFEIRLFAHEAGMPEEIEEIVQQLLEMAKEAQKAGDEELARIVLLVAQILLLIIKILIYAREAGMPEEIEEIVQQLLEMAKEASKAGDEELARIVLLVAQILLLIILILIQARKAGMPEEIEEIVQQLLEMAKEASKAGDEQLAIIVLIVAQILLLIILILIQARKAGMPEEIEEIVQQLLEMAKEASKAGDIRLAYRVLAEAKLLLEEIRQL

SEQ ID NO: 1781 - protein, 206 aa, synthetic construct
  REGION 1..206: note = Synthetic
DTIEHLINHLEDLLIQIKHQAPTEEFLEVIRLAFELALKAVKTGDERLVRIAILILELLLLMIRIKELAPTEEFLEVIRLAFELALKAVKTGDERLVRIAILILELLLLMIEIKRLAPTEEFLEVIRLAFELALKAVKTGDLHLVLIAIFILELLLLMIRIKELAPTEEFLEVIRLAFELALKAVKTGDLELVVKAILELLRLVLS

SEQ ID NO: 1782 - protein, 225 aa, synthetic construct
  REGION 1..225: note = Synthetic
SEVEELLQKILELLLHMETIHKLTGDPQLEELIQRALELFEEARKSGDPESVKLALLLALILYLLAFMVLIWKQTGDPQLEELIQRALELFEEARKSGDPESVKLALLLALILYLLAFMVLIWKQTGDPQLEELIQRALELFEEARKSGDPESVKLALLLALILYLLAFMVLIWKQTGDPKLEELIQRALELFEEARKSGDPEDVLRALVQAISLFLLARNILEL

SEQ ID NO: 1783 - protein, 234 aa, synthetic construct
  REGION 1..234: note = Synthetic
SDEVLELIIKAESVARLIKLIGSPGAEETFQSVLELIRRVIEMALLGDPKEALKLAEVVLLILQAFYIALKIKKTGSPGAEETFQSVLELIRRVIEMALLGDPKEALKLAEVVLLILQAFYIALLIKQTGSPGAEETFQSVLELIRRVIEMALLGDPKEALKLARVVLLILQAFYIALLIKQTGSPGAEETFQSVLELIRRVIEMALLGDPEKAYRLALQVLFHLELFLEELRS

SEQ ID NO: 1784 - protein, 273 aa, synthetic construct
  REGION 1..273: note = Synthetic
EEELLIRLLSLADRAFHIAQLALLLYEKTGDPKAQELVKEALELILQVIKLLLETARQSTDEETHMRLLYLAAELAVQLAQLALQLYERTGDPKAQELVKEALELILQVIKLLLETARQSTDEETHMRLLYLAAELAVQLAQLALQLYERTGDPKAQELVKEALELILQVIKLLLETARQSTDEETHMRLLYLAAELAVQLAQLALQLYERTGDPKAQELVKEALELILQVIKLLLETARQSTDEHTRLRLEVLAYELEVLLRSLAQQLYERT

SEQ ID NO: 1785 - protein, 273 aa, synthetic construct
  REGION 1..273: note = Synthetic
EETHMRRLFLEALYAFLEAQLALVRFELEGDPKAQELVKEALELILQVIKLLLETARQSTDEETHMRLLYLAAELAVQLAQLALQLYERTGDPKAQELVKEALELILQVIKLLLETARQSTDEETHMRLLYLAAELAVQLAQLALQLYERTGDPKAQELVKEALELILQVIKLLLETARQSTDEETHMRLLYLAAELAVQLAQLALQLYERTGDPKAQELVKEALELILQVIKLLLETARQSTDEETHKRLLRLAEHLATLLRRLARQLYERT

SEQ ID NO: 1786 - protein, 284 aa, synthetic construct
  REGION 1..284: note = Synthetic
DELEEMLDEVRLLAQLIEVYLEFLLKIAKRDGDPQLKELIQIVLELAIQALRFAQEAVETGDMELVELALMLLLVAILAVRIAILLHKLLKIAKLDGDPQLKELIQIVLELAIQALRFAQEAVETGDMELVELALMLLLVAILAVRIALLLKELLRIAKLDGDPQLKELIQIVLELAIQALRFAQEAVETGDMHLVELALLLLLVAILAVRIALLLKELLRIAKLDGDPQLKELIQIVLELAIQALRFAQEAVERGDEHLVLEALLILHRAEVLVRKAQIEKEL

SEQ ID NO: 1787 - protein, 210 aa, synthetic construct
  REGION 1..210: note = Synthetic
DEEEELILEAKLIVTRIRRLAKKAGSMELMELAVELAQRAHNSTDEEELRLLLLVVEAIHIVLQIIVLAKKAGSMELMELAVELAQRAHNSTDEEELRLLLLVVEAIHIVLQIIVLAKKAGSMELMELAVELAQRAHNSTDEEELRLLLLVVEAIHIVLQIIVLAKKAGSMELMELAVELAQRAHNSTDETELRELILLVLIILQRLRRL

SEQ ID NO: 1788 - protein, 284 aa, synthetic construct
  REGION 1..284: note = Synthetic
SELEQQLEKVRILALLIEVLLIVLLKLAKEDGDPQLKELIQIVLELAIQALRFAQEAVETGDMELVELALMLLLVAILAVEIALLLFELLRRAEEDGDPQLKELIQIVLELAIQALRFAQEAVETGDMELVELALMLLLVAILAVRIALLLKELLRIAKLDGDPQLKELIQIVLELAIQALRFAQEAVETGDMELVELALLLLLVAILAVRIALLLKELLRIAKLDGDPQLKELIQIVLELAIQALRFAQEAVERGDKHLVNHALRLLHEAIHLVQEALNEKRS

SEQ ID NO: 1789 - protein, 284 aa, synthetic construct
  REGION 1..284: note = Synthetic
VELHEMRLKVRLLAQEIEALLEYLLIIAKEDGDPQLKELIQIVLELAIQALRFAQEAVETGDMELVELALMLLLVAILAVRIAILLHELLRIAKLDGDPQLKELIQIVLELAIQALRFAQEAVETGDMELVELALMLLLVAILAVRIALLLKELLRIAKLDGDPQLKELIQIVLELAIQALRFAQEAVETGDMELVELALMLLLVAILAVRIALLLKELLRIAKLDGDPQLKELIQIVLELAIQALRFAQEAVETGDKHLVERALLILLQALVLVLRALVEKNS

SEQ ID NO: 1790 - protein, 273 aa, synthetic construct
  REGION 1..273: note = Synthetic
SELEKIAQEVRTLAQLVESLIQLVHELNSSDPKFRELVELAIELALLALRLLKEALETGDKKLAELALIALKVAYMALLVLRLIVEVFEQNSSDPKFRELVELAIELALLALRLLKEALETGDKKLAELALIALKVAYMALLVLLLIVRVFQQNSSDPKFRELVELAIELALLALRLLKEALETGDKKLAELALIALKVAYMALLVLLLIVRVFQQNSSDPKFRELVELAIELALLALRLLKEALETGDKRLAEEAHLALLRALLLLLELLLS

SEQ ID NO: 1791 - protein, 273 aa, synthetic construct
  REGION 1..273: note = Synthetic
DELEQIALRVRVLARLVELLIRIVFKQNSSDPKFRELVELAIELALLALRLLKEALETGDKKLAELALIALKVAYMALLVLLLIVRVFQQNSSDPKFRELVELAIELALLALRLLKEALETGDKKLAELALIALKVAYMALLVLLLIVRVFQQNSSDPKFRELVELAIELALLALRLLKEALETGDKKLAELALIALKVAYMALLVLLLIVRVFQQNSSDPKFRELVELAIELALLALRLLKEALETGDRDLALRAYLALLHALIALEELLNS

SEQ ID NO: 1792 - protein, 273 aa, synthetic construct
  REGION 1..273: note = Synthetic
DELREIALRVRHLAHLVRLLIEIVFKLNSSDPKFRELVELAIELALLALRLLKEALETGDKKLAELALIALKVAYMALLVLLLIVRVFQQNSSDPKFRELVELAIELALLALRLLKEALETGDKKLAELALIALKVAYMALLVLLLIVRVFQQNSSDPKFRELVELAIELALLALRLLKEALETGDKKLAELALIALKVAYMALLVLLLIVRVFQQNSSDPKFRELVELAIELALLALRLLKEALETGDKKLAEQARLLLLQALLLLQQLLHS

SEQ ID NO: 1793 - protein, 273 aa, synthetic construct
  REGION 1..273: note = Synthetic
DELETIADKVRNLARSVEALIRLVFKLNSSDPKFRELVELAIELALLALRLLKEALETGDKKLAELALIALKVAYMALLVLLLIVRVFQQNSSDPKFRELVELAIELALLALRLLKEALETGDKKLAELALIALKVAYMALLVLLLIVRVFQQNSSDPKFRELVELAIELALLALRLLKEALETGDKKLAELALIALKVAYMALLVLLLIVRVFQQNSSDPKFRELVELAIELALLALRLLKEALETGDQKLALRAYLALVEALVLLLELLLD

SEQ ID NO: 1794 - protein, 241 aa, synthetic construct
  REGION 1..241: note = Synthetic
DLELEIRLLIHRARHVILKVKEAATDPEFQEAIRLLIELVLKIARLAKRGKDAELAFLMAQIVLLIALALLTILEVKEAATDPEFQEAIRLLIELVLKIARLAKRGKDAELAFLMAQIVLLIALALLTILEVKEAATDPEFQEAIRLLIELVLKIARLAKRGKDAELAFIMAQIVLLIALALLTILEVKEAATDPEFQEAIRLLIELVLKIARLAKRGKDAKHALLLARRVLDTARFLLEL

SEQ ID NO: 1795 - protein, 241 aa, synthetic construct
  REGION 1..241: note = Synthetic
DLMERIEELIERAEAVIRLVKRAATDPEFQEAIRLLIELVLKIARLAKRGKDAELAFLMAQIVLLIALALYTITLVKKAATDPEFQEAIRLLIELVLKIARLAKRGKDAELAFLMAQIVLLIALALRTILEVKKLATDPEFQEAIRLLIELVLKIARLAKRGKDAELAHYMALIVLIIALALLTILEVKEAATDPEFQEAIRLLIELVLKIARLAKRGKDAERAYQLALRVLVLALELLYS

SEQ ID NO: 1796 - protein, 234 aa, synthetic construct
  REGION 1..234: note = Synthetic
DEAIQLLVELISELTERIFRSTDREKIRKLLELILLMILIILLSLRAEEAYQKAKQMGDKELLEAIQLLLELVLELIRRVYESTDEEKIRKLLELIILMLRIIILSVQATEAYQKAKQMGDKELLEAIQLLLELVLELIRRVYESTDEEKIRKLLELIILMLRIIILSVQATEAYQKAKQMGDKRLLELIQEILERVLELIRRVYESTDEEKIRRLLESILTLLQFIITSVRDS

SEQ ID NO: 1797 - protein, 227 aa, synthetic construct
  REGION 1..227: note = Synthetic
DEEVERAILQIEVLARILSRHTGDPELAERFLRLAKRVLEQVKTGFDAKELFEELLVLLMILQILLLAQQLSEQTGDPELAERFLRLAKRVLEQVKTGFDAKELFEELLVLLMILQILLLAQQLSEQTGDPELAERFLRLAKRVLEQVKTGFDAEELFDELRVLLMILQILLLAQQLSEQTGDPELAERFLRLAKRVLEQVKTGFDATRLLSFLLHLLLELELLLRS

SEQ ID NO: 1798 - protein, 210 aa, synthetic construct
  REGION 1..210: note = Synthetic
SRLERLVFEAKLIVQRIEFLAKEAGSMELMELAVELAQRAHNSTDEEELRLLLLVVEAIHIVLQIIVLAKKAGSMELMELAVELAQRAHNSTDEEELRLLLLVVEAIHIVLQIIVLAKKAGSMELMELAVELAQRAHNSTDEEELRLLLLVVEAIHIVLQIIVLAKKAGSMELMELAVELAQRAHNSTDEEELIRLLLEVIYILYQLRLS

SEQ ID NO: 1799 - protein, 202 aa, synthetic construct
  REGION 1..202: note = Synthetic
DELELRVQRALLELRFLAEQAGDESALEILEKARQALQEGDEEKLRFVLLLIKVAKSMIELYRLAKEAGDESALEILEKARQALQEGDEEKLRFVLLLIKVAKSMIELYRLAKEAGDESALEILEKARQALQEGDEEKLRFVLLLIKVAKSMIELYRLAKEAGDEHALEVLEKARQALQEGDERKLEEVLLLIEFAKRQIES

SEQ ID NO: 1800 - protein, 211 aa, synthetic construct
  REGION 1..211: note = Synthetic
DERLEQALELVTEIRIIARRIYRETGDEQALKLAEEAFEILREVKAQKGSEELEELMRLVQALLLVAKILLIALQIYRETGDEQALKLAEEAFEILREVKAQKGSEELEELMRLVQALLLVAKILLIALQIYRETGDEQALKLAEEAFEILREVKAQKGSEELEELMRLVHLLLEVAIILLHALRFFRLTGDENAKKIAEHAFELLRNIKA

SEQ ID NO: 1801 - protein, 203 aa, synthetic construct
  REGION 1..203: note = Synthetic
DDLRILIEIILQQAEIIAHYAGDEEVLRLLSELIKQAANATPEELEEYLVLAKILLTLIRAVFIARIAGDEEVLRLLSELIKQAANATPEELERYLLLAKILLTLIQAVLYAKRAGDEEVLRLLSELIKQAANATPEELFRFYLLAQILLHLIQAVWYAKRAGDEEVLRLLSELIKQAANATPEELFQYLAIALKLYLHIARV

SEQ ID NO: 1802 - protein, 262 aa, synthetic construct
  REGION 1..262: note = Synthetic
DLEIEKLIFHAEYAIRSLERLSQSGDEESMKIALELVEILVEIIRRIKQLLMKDPEKAKTLAEIALLIVYAALAILRLLELSQSGDEESMKIALELVEILVEIIRRIKQLLMKDPEKAKTLAEIALLIVYAALAILRLLELSQSGDEESMKIALELVEILVEIIRRIKQLLMKDPEKAKELAEIALFIVEAALAILRLLELSQSGDEESMKIALELVEILVEIIRRIKQLLMKDPEKAHELALKAREVVARARYILELLERS

SEQ ID NO: 1803 - protein, 242 aa, synthetic construct
  REGION 1..242: note = Synthetic
DELEEIRTHALYLAHEAIRLVKRVLRETGDEKAQELLEEIIQILRQMKEVTDPEELKLLLLLLEAFVLAALAILLVLIVLRETGDEKAQELLEEIIQILRQMKEVTDPEELKLLLLLLEAFVLAALAILLVLIVLRETGDEKAQELLEEIIQILRQMKEVTDPEELKLLLLLLEAFVLAALAILLVLIVLRETGDEKAQELLEEIIQILRQMKEVTDPLKLKVLLLRLLSLVLEAEFILRIL

SEQ ID NO: 1804 - protein, 242 aa, synthetic construct
  REGION 1..242: note = Synthetic
SKLEELLLKAQELAAIAYVLVQQVLQRTGDEKAQELLEEIIQILRQMKEVTDPEELKLLLLLLEAFVLAALAILLVLIVLRETGDEKAQELLEEIIQILRQMKEVTDPEELKLLLLLLEAFVLAALAILLVLIVLRETGDEKAQELLEEIIQILRQMKEVTDPEELKLLLLLLEAFVLAALAILLVLIVLRETGDEKAQELLEEIIQILRQMKEVTDPEELHELLLKLRLLVIEAEHILERL

SEQ ID NO: 1805 - protein, 242 aa, synthetic construct
  REGION 1..242: note = Synthetic
DKLEELLRHAERLAHLAEKLVKIVLRETGDEKAQELLEEIIQILRQMKEVTDPEELKLLLLLLEAFVLAALAILLVLIVLRETGDEKAQELLEEIIQILRQMKEVTDPEELKLLLLLLEAFVLAALAILLVLIVLRETGDEKAQELLEEIIQILRQMKEVTDPEELKLLLLLLEAFVLAALAILLVLIVLRETGDEKAQELLEEIIQILRQMKEVTDPHELRLLLEQLRLLVHLARLILEQL

SEQ ID NO: 1806 - protein, 242 aa, synthetic construct
  REGION 1..242: note = Synthetic
DQELYILAHAFYLAEEARLLVLIVLRETGDEKAQELLEEIIQILRQMEEVTDPEELKLLLLLLEAFVLAALAILLVLIVLRETGDEKAQELLEEIIQILRQMKEVTDPEELKLLLLLLEAFVLAALAILLVLIVLRETGDEKAQELLEEIIQILRQMKEVTDPEELKLLLLLLEAFVLAALAILLVLIVLRETGDEKAQELLEEIIQILRQMKEVTDPLELRLLLYKLRFLVELARRILLVL

SEQ ID NO: 1807 - protein, 242 aa, synthetic construct
  REGION 1..242: note = Synthetic
LKLLLLLLEAFVLAKLAEELVNLVLVLTGDEKAQELLEEIIQILRQMKEVTDPEELKLLLLLLEAFVLAALAIYLVLEVLRLTGDEKAQELLEEIIQILRQMKEVTDPEELKLLLLLLEAFVLAALAILLVLIVLRETGDEKAQELLEEIIQILRQMKEVTDPEELKLLLLLLEAFVLAALAILLVLIVLRETGDEKAQELLEEIIQILRQMKEVTDPEELRRLLRKLLEYVNQAYLILRFS

SEQ ID NO: 1808 - protein, 218 aa, synthetic construct
  REGION 1..218: note = Synthetic
LLEKQVLELVFRLLFLAQLSGDEEDRKSMEELFEQVQRAYKAGDLEKLKEALLSLQVLILVLQLIELARKSGDEEDRKSMEELLEQVLRALEAGDLEKLKEALLSLQVLILVLQLIELARKSGDEEDRKSMEELLEQVLRALEAGDLEKLKEALLSLQVLILVLQLIELARKSGDEEDRKSMEELLEQVLRALEAGDLEKLKEAQDRLRHLILRLRRI

SEQ ID NO: 1809 - protein, 249 aa, synthetic construct
  REGION 1..249: note = Synthetic
DELEKLKLEIEYLRLLLEILIRRLKRANDPEVRESIEQAKQLIQEAIELVRSGDEKDIRLALLLMQIAYLLLELVRLIEELKRANDPEVRESIEQAKQLIQEAIELVRSGDEKDIRLALLLMQIAYLLLELVRLIEELKRANDPEVRESIEQAKQLIQEAIELVRSGDEHDIRLALLLMQIAYLLLELVRLIEELKRANDPEVREAIERAKQIIQEAIELVRSGDEEDIYKAYNLMLLAFDLLRLVRER

SEQ ID NO: 1810 - protein, 244 aa, synthetic construct
  REGION 1..244: note = Synthetic
DEHELKLLEAEYLILKAEHIIKRILREFGDPRAEELAQQLIEDLRQLKNARSKEEFEWYLKLIKAVVLIVEALLIILRILREFGDPRAEELAQQLIEDLRQLKNARSKEEFEWYLKLIKAVVLIVEALLIILRILREFGDPRAEELAQQLIEDLRQLKNARSKEEFEWYLLLIKAVVLIVEALLIILRILREFGDPRAEELAQQLIEDLRQLKNARSKEEFSHYLLRIERVVLEVKLLLKRLRS

SEQ ID NO: 1811 - protein, 245 aa, synthetic construct
  REGION 1..245: note = Synthetic
SELRNEIRELVVRVNLIADQLKEEGLGAEEAQKHAEKAKELLERAQQAKDPEEIRIMLLLLQILLLVIQVLQIALQLVKEGLGAEEAQKHAEKAKELLERAQQAKDPEEIRIMLLLLQILLLVIQVLQIALQLVKEGLGAEEAQKHAEKAKELLERAQQAKDPEEIRIMLLLLQILLLVIQVLQIALQLVKEGLGAEEAQKHAEKAKELLERAQQAKDPREIHKLLLQLEVLLRQIEVLLQRLRL

SEQ ID NO: 1812 - protein, 245 aa, synthetic construct
  REGION 1..245: note = Synthetic
MLLLLQIELLVRRVFRIAALLKYDGLGAEEAQKHAEKAQELLERAQQAKDPEEIRIMLLLLQILLLVIQVLEIALQLVKEGLGAEEAQKHAEKAKELLERAQQAKDPEEIRIMLLLLQILLLVIQVLQIALQLVKEGLGAEEAQKHAEKAKELLERAQQAKDPEEIEIMLLLLQILLLVIQVLQIALQLVKEGLGAEEAQKHAEKAKELLERAQQAKDPEEIHEMLHRLRELLLQIRNLQERLQH

SEQ ID NO: 1813 - protein, 222 aa, synthetic construct
  REGION 1..222: note = Synthetic
SEIERILLEIDELLARAKVLARNLGSEEYREIIRELVQLLKEATETGDPKKLEIVLILAEILVILLKATFFARELGSEEYREIIRELVQLLKEATETGDPKKLEIVLILAEILLILLKATEFARQLGSEEYREIIRELVQLLKEATETGDPKKLEIVLILARILLILLKATQFARQLGSEEYREIIRELVQLLKEATETGDPKKLKEVLRRALELLVRLETS

SEQ ID NO: 1814 - protein, 222 aa, synthetic construct
  REGION 1..222: note = Synthetic
SEEEYILLEIRLLLLQAEVLAKDLGSEEYREIIRELVQLLKEATETGDPKKLEIVLILAEILVILLLATFYARVLGSEEYREIIRELVQLLKEATETGDPKKLEIVLILAEILLILLLATFLARILGSEEYREIIRELVQLLKEATETGDPKKLKIVLILATILLILLKATRFARQLGSEEYREIIRELVQLLKEATETGDPKKLEEVLRLAHELLIRLRNS

SEQ ID NO: 1815 - protein, 222 aa, synthetic construct
  REGION 1..222: note = Synthetic
DEIERILLRIHSLLREAELFARLLGSEEYREIIRELVQLLKEATETGDPKKLEIVLILAEILLILLKATHFARKLGSEEYREIIRELVQLLKEATETGDPKKLEIVLILAEILLILLKATQFARQLGSEEYREIIRELVQLLKEATETGDPKKLKIVLILARILLILLKATQFARQLGSEEYREIIRELVQLLKEATETGDPHKLKHVLALAFELLTRLELS

SEQ ID NO: 1816 - protein, 222 aa, synthetic construct
  REGION 1..222: note = Synthetic
DKFEQLITKAKAFLLLARIIAREAGSEEMLELIRQVLELLLQLTETGDEEKLKFVLLIAQAIFFLAQAYEYARKAGSEEMLELIRQVLELLLQLTETGDEEKLKFVLLIAQAIFFLAQAYEYARKAGSEEMLELIRQVLELLLQLTETGDEEKLKFVLLIAQAIFFLAQAYEYARKAGSEEMLELIRQVLELLLQLTETGDEEKLRHVLNEAQKIFTEARQL

SEQ ID NO: 1817 - protein, 218 aa, synthetic construct
  REGION 1..218: note = Synthetic
DILEEKALQFVFTALVYARQAGDEETRRTIEQLEQQLEEAIRNNDPEEIKRVILSLKAHIQMLRALLLARRAGDEETRRTIEQLSQQLLEAYRNNDPEEIKRVILSLKAHIQMLEALELARKAGDEETRRTIEQLSQQLLEAYRNNDPEEIKRVILSLEAHIAMLEALELARKAGDEETRRTIEQLSQQLLEAYRNNDPEEIKEVILHLLHIINRLRL

SEQ ID NO: 1818 - protein, 251 aa, synthetic construct
  REGION 1..251: note = Synthetic
DEEIQQLLQLLRRLIYEMEEIWRQNPNAESALKASQSLREAIEEAKRYQQEGDYEKAVTVLEIAFLLALLLKLIYEMEEIWRQNPNAESALKASQSLREAIEEAKRYQQEGDYEKAVTVLEIAFLLALLLKLIYEMEEIWRQNPNAESALKASQSLREAIEEAKRYQQEGDYEKAVTVLEIAFLLALLLKLIYEMEEIWRQNPNAEEARIASEVLRNAIELAKKNQQRGDYRLAVQILRIAFLFAQLLKES

SEQ ID NO: 1819 - protein, 251 aa, synthetic construct
  REGION 1..251: note = Synthetic
DEEIKHLLRLLFLLIAEMELIWQENPNAESALKASQSLREALEEAQRYLEEGDYEKAVTVLEIAFLLALLLKLIYEMEEIWRQNPNAESALKASQSLREAIEEAKRYQQEGDYEKAVTVLEIAFLLALLLKLIYEMEEIWRQNPNAESALKASQSLREAIEEAKRYQQEGDYEKAVTVLEIAFLLALLLKLIYEMEEIWRQNPNAEHALKASQRLREAIEEAKRLQQEGDYRRAVLELKLAFYYAQINKLQ

SEQ ID NO: 1820 - protein, 250 aa, synthetic construct
  REGION 1..250: note = Synthetic
DKFLEMILKVEFLVRIIEHIAARQGAEEFQETARQIFEEALQALELWKQGNKEEALRILKFLLMILKVILLVLKILEIAAKQGAEEFQETARQIFEEALQALELWKQGNKEEALRILKFLLMILKVILLVLRILEIAAKQGAEEFQETARQIFEEALQALELWKQGNKEEALRILHFLLQILKVILLVLRILEIAAKQGAEEFQETARQIFEEALQALELWKQGNKEEALKILLHLLILLQEILLRLEHL

SEQ ID NO: 1821 - protein, 251 aa, synthetic construct
  REGION 1..251: note = Synthetic
VEEIAKLLALLHQLIAEMEHIWRENPNAESALKASQSLREAIEEAKRYQQEGDYEKAVTVLEIAFLLALLLKLIYEMEEIWRQNPNAESALKASQSLREAIEEAKRYQQEGDYEKAVTVLEIAFLLALLLKLIYEMEEIWRQNPNAESALKASQSLREAIEEAKRYQQEGDYEKAVKVLEIAFLLALLLKLIYEMEEIWRQNPNAEHALEASQRLREAIEEAKRYQQEGDLDKASIELRLALTYARLLKEL

SEQ ID NO: 1822 - protein, 269 aa, synthetic construct
  REGION 1..269: note = Synthetic
DFLEKEAIRLALEVILIVHEIKQKAESEEDQKRAQELLEKIVEIAEQLTESLREGDPEEARTMFLILQAILLALQVILLVIRIKQTAESEEDQKRAQELLEKIVEIAEQLTESLREGDPEEARTMFLILQAILLALQVILLVIRIKQTAESEEDQKRAQELLEKIVEIAEQLTESLREGDPEEARTMFLILQAILLALQVILLVIRIKQTAESEEDQKTAQELLEKIVEIAEQLTESLREGDPHEARRMLEILFEILLRLELLLKSIRS

SEQ ID NO: 1823 - protein, 269 aa, synthetic construct
  REGION 1..269: note = Synthetic
DELELEAIRLAIEVKRLVIRIKQTAESEEDQKRAQELLEKIVEIAEQLTESLREGDPEEARTMFLILQAILLALQVILLVIRIKQTAESEEDQKRAQELLEKIVEIAEQLTESLREGDPEEARTMFLILQAILLALQVILLVIRIKQTAESEEDQKRAQELLEKIVEIAEQLTESLREGDPEEARTMFLILQAILLALQVILLVIRIKQTAESEELQKLAQELLEKIVEIAEQLTESLREGDPRKAYHMLLLLLIILLQLQYILLEIRI

SEQ ID NO: 1824 - protein, 254 aa, synthetic construct
  REGION 1..254: note = Synthetic
DELLRKARKLASRVLALVFEIEVFAKSEEDIERAKEIAERIIELMRQAQNVSPEQVQKILLLLKALLLALEVLYLVIEIVIEAKSEEDIERAKEIAERIIELMRQAQNVSPEQVQKILLLLKALLLALEVLKLVIQIVEKAKSEEDIERAKEIAERIIELMRQAQNVSPEQVRKILLLLEALLLALEVLKLVIQIVEHAKSEEDIERAKEIAERIIELMRQAQNVSPEQVLHILHLLKELLTELETLKQKIEHS

SEQ ID NO: 1825 - protein, 222 aa, synthetic construct
  REGION 1..222: note = Synthetic
DELEQLLLEALSIIIEAEQLVRKTGDEESSEQLREVLQEIIEALREGDPEKIYMILLLAQALLIIIKALLLVQKTGDEESSEQLREVLQEIIEALREGDPEKIYMILLLAQALLIIIKALLLVQKTGDEESSEQLREVLQEIIEALREGDPEKIYMILLLAQALLIIIKALLLVQKTGDEESSEQLREVLQEIIEALREGDPHKILEILILAEFLLQRIELN

SEQ ID NO: 1826 - protein, 222 aa, synthetic construct
  REGION 1..222: note = Synthetic
DYMEKLLTEARSIIHRAENLVENTGDEESSEQLREVLQEIIEALREGDPEKIYMILLLAQALSIIIEALLLVQETGDEESSEQLREVLQEIIEALREGDPEKIYMILLLAQALLIIIKALLLVQKTGDEESSEQLREVLQEIIEALREGDPEKIRMILLLAQALLIIIKALLLVQKTGDEESSEQLREVLQEIIEALREGDPEKIFEILLTAIKLLLHIEFL

SEQ ID NO: 1827 - protein, 241 aa, synthetic construct
  REGION 1..241: note = Synthetic
SEAEAFALKVLVEIRKLLKDAKEAGDEELYEELKRLFEQLKQELQEARENGDVEKLFASATAFSVLVQILELLLEAKRAGDEELYEELKRLFEQLKQELQEARENGDVEKLFASATAFSVLVQILELLLEAKRAGDEELYEELKRLFEQLKQELQEARENGDVEKLFASATAFSVLVQILELLLEAKRAGDEELYEELKRLFEQLKQELQEARENGDVKHLQKVAFHFSLIVQQLEQELRS

SEQ ID NO: 1828 - protein, 241 aa, synthetic construct
  REGION 1..241: note = Synthetic
DKAELTALEVLLQIRFLLRLAKRAGDEELYEELKRLFEQLKQELQEARENGDVEKLFASATAFSVLVQILHLLLEAKRAGDEELYEELKRLFEQLKQELQEARENGDVEKLFASATAFSVLVQILELLLEAKRAGDEELYEELKRLFEQLKQELQEARENGDVDKLRASATAFSVLVQILELLLEAKRAGDEELYEELKRLFEQLKQELQEARENGDVEKLLRSAREFEQIVEKLERLLEA

SEQ ID NO: 1829 - protein, 241 aa, synthetic construct
  REGION 1..241: note = Synthetic
DEASQTARRVLHEIRALLEEAKRAGDEELYEELKRLFEQLKQELQEARENGDVEKLRASATAFSVLVQILELLLLAKKAGDEELYEELKRLFEQLKQELQEARENGDVQKLLASATAFSVLVQILHLLLLAKRAGDEELYEELKRLFEQLKQELQEARENGDVELLFASAFAFSVLVQILRLLLEAKRAGDEELYEELKRLFEQLKQELQEARENGDVERLLEVASRFSAIVLLLELRLLS

SEQ ID NO: 1830 - protein, 241 aa, synthetic construct
  REGION 1..241: note = Synthetic
DIAEESAFQALAQILLILILAKEAGDEELYRRLKELFEQLRQDMEEVRRNGDVELLIASASAFSALVQILLILLRAKEAGDEELYRRLKELFEQLQQDMEEVKRNGDVELLIASASAFSALVQILEILLKAKEAGDEELYRRLKELFEQLQQDMEEVKRNGDVELLRASALAFSALVQILEILLKAKEAGDEELYRRLKELFEQLQQDMEEVKRNGDYHLLYEIALQFIVIVLKLEYRLKS

SEQ ID NO: 1831 - protein, 250 aa, synthetic construct
  REGION 1..250: note = Synthetic
DEFKEMIRKVEKLVREIEEIAARQGAEEFQETARQIFEEALQALELWKQGNKEEALRILKFLLMILKVILLVLRILEIAAQQGAEEFQETARQIFEEALQALELWKQGNKEEALRILKFLLMILKVILLVLRILQIAARQGAEEFQETARQIFEEALQALELWKQGNKEEALRILRFLLLILRVILLVLRILEIAAKQGAEEFQETARQIFEEALQALELWKQGNKEEAEKILRKLLQLLYQILLELEQL

SEQ ID NO: 1832 - protein, 285 aa, synthetic construct
  REGION 1..285: note = Synthetic
DTIELDVHVAVTLARLAIIILMEMLKQNPHAEEAKEIIEILLELLQSAVESLRRLKQTGDEEYERTLEIIVDVIKAVVLAAIAVYLLMLMLKLNPHAEEAKEIIEILLELLQSAVESLRRLKQTGDEEYLRTLKIIVLVIEAVVLAALAVFLLMLMIRENPHAEEAKEIIEILLELLQSAVESLRRLKQTGDEEYLRTLQIIVLVILAVVEAAIAVFLLMRMLKHNPHAEEAKEIIEILLELLQSAVESLRRLKQTGDEEYLRTLERIVREIYRVVAEALIVYVS

SEQ ID NO: 1833 - protein, 266 aa, synthetic construct
  REGION 1..266: note = Synthetic
DEVEEIAYQAHRVYILVRELLMQIKLAGNEEFYEKALEILRLAKRIIEKAREALRRGDKELVQVLSIAAQALLVFAQVLFLLMQIKLAGNEEFYEKALEILRLAKRIIEKALEATERGDKELVQVLSIAAQALLVFAQVLFLLMQIKLAGNEEFYEKALEILRLAKRIIEKALEATERGDKELVQVLSIAAQALLVFAQVLFLLMQIKLAGNEEFYKRALDILRLAKELIELALEATERGDKELVENLIQLALALLHFAETLFRLA

SEQ ID NO: 1834 - protein, 268 aa, synthetic construct
  REGION 1..268: note = Synthetic
DELEKILLLAAFVLVLVFKVLETVKQSGDPEEIRQAEELLRKAVHLTELAIRAFYNGDKETLELLSFLLQALSVMVQVILVLYTVKQSGDPEEIRQAKELSRKAKELTERAEEAFKNGDKETLELLSFLLQALSVMVQVILVLYTVKQSGDPEEIRQAKELSRKAKELTERAEEAFKNGDKETLELLSFLLQALSVMVQVILVLYTVKQSGDPDLIRLAKELSRRAKELTERAEEAFKNGDKRTLERLLSLLELLSYAVLVIEDIFKS

SEQ ID NO: 1835 - protein, 265 aa, synthetic construct
  REGION 1..265: note = Synthetic
DEVEELFAQLELLIRRIVELMRQSEDEEEQERFQQVIETLRKALEQALELFKAGDYEKVRQILKVAILLAQLLELIRKIVELMRQSEDEEEQERFQQVIETLRKALEQALELFKAGDYEKVRQILKVAILLAQLLELIRKIVELMRQSEDEEEQERFQQVIETLRKALEQALELFKAGDYEKVRRILKVAILLAQLLELIRKIVELMRQSEDERQQELFQEVIELLRKALEQALELFKAGDLHEVSFRLLVALHLARTLEEVIKS

SEQ ID NO: 1836 - protein, 265 aa, synthetic construct
  REGION 1..265: note = Synthetic
DKVEELFDHLKLLIRIIVELMRQSEDEEEQERFQQVIETLRKALEQALELFKAGDYEKVRQILKVAILLAQLLRLIRKIVELMRQSEDEEEQERFQQVIETLRKALEQALELFKAGDYEKVRKILEVAILLAQLLELIRKIVELMRQSEDEEEQERFQQVIETLRKALEQALELFKAGDLRKVYFILRVAILLAQLLELIRKIVELMRQSEDEREQELFQEIIEYLRKALEQALELFKAGDLERVLFILLRAITTAKLLEEILKL

SEQ ID NO: 1837 - protein, 272 aa, synthetic construct
  REGION 1..272: note = Synthetic
DRLEELAFRAREYVQRAHLLARLILRNATSPEAQKVAETLIEIVLEILRIIQEALQRNDEEKIRLVMLAASAAWYVASAVLLAIKILRLATSPEAQKVAETLIEIVLEILRIIQEALQRNDEEKIRLVMLAASAAWYVASAVLLAIKILRLATSPEAQKVAETLIEIVLEILRIIQEALQRNDEEKIRLVMLAASAAWYVASAVLLAIKILRLATSPEAQKVAETLIEIVLEILRIIQEALQRNDERKIFEVLSLATKAVLHAETVLLRIEL

SEQ ID NO: 1838 - protein, 272 aa, synthetic construct
  REGION 1..272: note = Synthetic
DEIETIALQALVLLLEAHRLARRILKEAQSPEAKKIAQLLLEILMRILEKLLEALEAGDEEQLRIILLAAMAVLLLAQAVLLAVRILKEAQSPEAKKIAQLLLEILMRILEKLLEALEAGDEEQLRIILLAAMAVLLLAQAVLLAVRILKEAQSPEAKKIAQLLLEILMRILEKLLEALEAGDEEQLRIILLAAMAVLLLAQAVLLAVRILKEAQSPEAKKIAQLLLEILMRILEKLLEALEAGDEELLRYILYLALFVLVLAFLVLFEVRS

SEQ ID NO: 1839 - protein, 272 aa, synthetic construct
  REGION 1..272: note = Synthetic
SRIEQLATEAENLLLLAEANAYAIRRLAQSPEAKKIAQLLLEILMRILEKLLEALEAGDEEQLRIILLAAMAVLLLARAVLLAVRILQEAQSPEAKKIAQLLLEILMRILEKLLEALEAGDEEQLRIILLAAMAVLLLAQAVLLAVRILKEAQSPEAKKIAQLLLEILMRILEKLLEALEAGDEEQLRIILIAAMAVLLLAQAVLLAVRILKEAQSPEAKKIAQLLLEILMRILEKLLEALEAGDERLLQQIEVLALKVLTEAHEVLIRVRS

SEQ ID NO: 1840 - protein, 272 aa, synthetic construct
  REGION 1..272: note = Synthetic
DEIEYLALRAQALLRLAEVIAELIRRIAQSPEAKKIAQLLLEILMRILEKLLEALEAGDEEQLRIILLAAMAVFLLAEAVVLAVEILLYAQSPEAKKIAQLLLEILMRILEKLLEALEAGDEEQLRIILLAAMAVLLLAQAVLLAVRILKEAQSPEAKKIAQLLLEILMRILEKLLEALEAGDEHQLRIILLAALAVLLLAQAVLLAVRILKEAQSPEAKKIAQLLLEILMRILEKLLEALEAGDYHQLLEIHELAVRVLNEALQVLLEVES

SEQ ID NO: 1841 - protein, 266 aa, synthetic construct
  REGION 1..266: note = Synthetic
DEIERLLIELVIIAQYLARLIKYHATSPEVREIAERAIEWALQIEQKIEQIERRGDKEKLEILLILLLLIILVLLAVLLAIRIKLRATSPEVREIAERAIEWALQILQKIEQIERRGDKEKLEILLILLLLIILVLLAVLLAIEIKRKATSPEVREIAERAIEWALQILQKIEQIERRGDKEKLEILLILLKLIILVLLAVLLAIEIKRKATSPEVREIAERAIEWALQILQKIEQIERRGDKEKLQELLRELLQIIVTLLQVLTS

SEQ ID NO: 1842 - protein, 250 aa, synthetic construct
  REGION 1..250: note = Synthetic
DKFEEMILEVRLLVYLILQIAALQGAEEFQETARQIFEEALQALELWKQGNKEEALRILKFLLMILKVILLVLRILEIAHRQGAEEFQETARQIFEEALQALELWKQGNKEEALRILKFLLMILKVILLVLRILEIAAKQGAEEFQETARQIFEEALQALELWKQGNKEEALEILHFLLLILRVILLVLRILEIAAKQGAEEFQETARQIFEEALQALELWKQGNKEEALEILIRLLSILHEILLRLEQL

SEQ ID NO: 1843 - protein, 266 aa, synthetic construct
  REGION 1..266: note = Synthetic
DEIEHELELLVKEAELLAKLIKLQATSPEVREIAERAIEWALQILQKIEQIERRGDKEKLEILLILLLLIILVLLAVLLAIQIKRKATSPEVREIAERAIEWALQILQKIEQIERRGDKEKLEILLILLLLIILVLLAVLLAIEIKRKATSPEVREIAERAIEWALQILQKIEQIERRGDKRKLLFLEILLLLIILVLLAVLLAIEIKRKATSPEVREIAERAIEWALQILQKIEQIERRGDVEKLHELLSELFEIILRLEQVLLS

SEQ ID NO: 1844 - protein, 238 aa, synthetic construct
  REGION 1..238: note = Synthetic
DLLRRLAHKLVFEVEHIARELFRRTGDEKAQELLEEAFELLQRIKRSTDPEEMKQLLLILLAVSLVAQVILIALELFQRTGDEKAQELLEEAFELLQRIKRSTDPEEMKQLLLILLAVSLVAQVILIALELFQRTGDEKAQELLEEAFELLQRIKRSTDPEEMKQLLLILLAVSLVAQVILIALELFQRTGDEKAQELLEEAFELLQRIKRSTDPHEMRRLIDELILVSVRARLLLES

SEQ ID NO: 1845 - protein, 257 aa, synthetic construct
  REGION 1..257: note = Synthetic
DELRLRVLKLVVKASELAIKIERHATDEEDAELAREALRIVVEIRRKIEESTDPEELKWLLLILQVILLVLQAMFLAIQIVKHATDEEDAELAREALRIVVEIARKIEESTDPEELKWLLLILQVILLVLQAMFLAIQIVKHATDEEDAELAREALRIVVEIARKIEESTDPEELKWLLLILQVILLVLQAMFLAIQIVKHATDEEDAELAREALRIVVEIARKIEESTDPRELKRLILELEIILLFLEHLLRQIEL

SEQ ID NO: 1846 - protein, 237 aa, synthetic construct
  REGION 1..237: note = Synthetic
DEEELHAIHLLRLVRELLSQARKEGDEEIFEIIRQLFEEVREAIRQFFRTGDPKYILLALALWLLAQVAWLLSQARKEGDEEIFEIIRQLFEEVEEAIEQYKRTGDPKYILLALALWLLAQVAWLLSQARKEGDEEIFEIIRQLFEEVEEAIEQYKRTGDPKYILLALALWLLAQVAWLLSQARKEGDEFIFEIIRYLFELVEEAIEQYKRTGDPKYIRRAESLHTLAETAFLLSKS

SEQ ID NO: 1847 - protein, 237 aa, synthetic construct
  REGION 1..237: note = Synthetic
SELEVHALRLLAQVAWLLSQARKEGDEEIFEIIRQLFEEVEEAIEQFKRTGDPKYILLALALWLLAQVAWLLSQARKEGDEEIFEIIRQLFEEVEEAIEQYKRTGDPKYILLALALWLLAQVAWLLSQARKEGDEEIFEIIRQLFEEVEEAIEQYKRTGDPKYILLALALWLLAQVAWLLSQARKEGDEQVFRLIKLLFELVEEAIESYKRTGDPRYIELAEALAYVAHVAHHLSRS

SEQ ID NO: 1848 - protein, 237 aa, synthetic construct
  REGION 1..237: note = Synthetic
DELLRHALQLLLEVDLLLYLAEKEGDEEIFEIIRQLFEEVEEAIEQFKRTGDPKYILLALALWLLAQVAWLLSQARKEGDEEIFEIIRQLFEEVEEAIEQYKRTGDPKYILLALALWLLAQVAWLLSQARKEGDEEIFEIIRQLFEEVEEAIEQYKRTGDPKYILLALALWLLAQVAWLLSQARKEGDEEVFEEIRQLFEEVEEAIEQYKRTGDPKYIRRAEQLWRRALLAWLNSRS

SEQ ID NO: 1849 - protein, 237 aa, synthetic construct
  REGION 1..237: note = Synthetic
DELLKQALLLLVLVYLLLELAEKEGDEEIFEIIRQLFEEVEEAIEQYRRTGDPKYILLALALWLLAQVAWLLSQARKEGDEEIFEIIRQLFEEVEEAIEQYKRTGDPKYILLALALWLLAQVAWLLSQARKEGDEEIFEIIRQLFEEVEEAIEQYKRTGDPKYILLALALWLLAQVAWLLSQARKEGDEHTFEFIRQLFEEVEEAIEQYKRTGDPRHIRHALVLFYAALIAYELSRS

SEQ ID NO: 1850 - protein, 264 aa, synthetic construct
  REGION 1..264: note = Synthetic
DIREHIKELALKIEEMFELVKEKLKTMSEEEIEQLLRVLQEAIELVVKALRLAQQGSLEEALILALIALLAVLIALMFARVKEKLKTMSEEEIEQLLRVLQEAIELVVKALRLAQQGSLEEALILALIALLAVLIALMFALVKEKLKTMSEEEIEQLLRVLQEAIELVVKALRLAQQGSLEEARLLAIIALLAVLIALMFALVKEKLKTMSEEEIERLLRDLQEAIELVVKALRLAQQGSLREAIEIAIRAFNIVNIALQYARN

SEQ ID NO: 1851 - protein, 219 aa, synthetic construct
  REGION 1..219: note = Synthetic
DTDESLALLLAILFAALFSLTTGDDEEAEQSYREMEEQIKRHASNPEELRQILLILKALVLAVLFAFLFLTTTGDREEAQQSLREMVEQIKRHASNPEELKQILLILLALVLAVLFALLFQLTTGDREEAQQSLREMVEQIKRHASNPEELRKILQILFALVLAVLFALLFLHTTGDKEEAQQSLREMVEQIKRHASNPEELEHILRHLFRLVLEVELS

SEQ ID NO: 1852 - protein, 241 aa, synthetic construct
  REGION 1..241: note = Synthetic
SEEQHIKLKVELFLQLLELIARETGDEELIQEMRELVEQIKQLLEEAKRTGDLRLFTQALIAAQVALFIALLFYIAEKTGDEELIQEMRELVEQIKQLLEEAKRTGDLRLFTQALIAAQVALFIALLFEIAEKTGDEELIQEMRELVEQIKQLLEEAKRTGDLELFEQALIAAIVALFIALLFEIAEKTGDEELIQEMRELVEQIKQLLEEAKRTGDLRLFYQALAAAYHALIQAERFERS

SEQ ID NO: 1853 - protein, 254 aa, synthetic construct
  REGION 1..254: note = Synthetic
DETIHLVSKALEIAKLIRLTAKRMGNEESLQLAQELLEELKRLEELFEEAGREEEALRNLKTILLVLKAILMALKIYEIAKRMGNEESLQLAQELLEELKRLLELFKEAGREEEALRNLKTILLVLKAILMALEIYEIAKRMGNEESLQLAQELLEELKRLLELFKEAGREEEALRNLKTILLVLKAILMALEIYEIAKRMGNEESLQLAQELLEELKRLLELFKEAGREEEALQNLIKILSILSHILEHLRLS

SEQ ID NO: 1854 - protein, 241 aa, synthetic construct
  REGION 1..241: note = Synthetic
SEQEEIELLVQLLLLLLEHIAKFTGDEELIQEMRELVEQIKQLLEEAKRTGDLRLFTQALIAAQVAYFIALLFFIALFTGDEELIQEMRELVEQIKQLLEEAKRTGDLRLFTQALIAAQVALFIALLFRIALQTGDEELIQEMRELVEQIKQLLEEAKRTGDRRLFYQALIAAQVALFIALLFEIAEKTGDEELIQEMRELVEQIKQLLEEAKRTGDLRLFTRALELAFRAYLIAREFEIS

SEQ ID NO: 1855 - protein, 272 aa, synthetic construct
  REGION 1..272: note = Synthetic
DQLDETILELDRLVVEIRLTARRLYRNGIDAENAKEIFEEAQQLLREAEELEKNVPDEELLKKLQLIITILILLQLVMRIVKTALELYRNGIDAENAKEIFEEAQQLFREAQELRKNVPDEELLKKLQLIITILILLQLVMEIVKTALELYRNGIDAENAKEIFEEAQQLFREAQELRKNVPDEELLKKLQLIITILILLQLVMEIVKTALELYRNGIDAEDAKEIFEEAQQLFREAQELRKNVPDEELHKKLIQIILILLLLQLYMEHRKT

SEQ ID NO: 1856 - protein, 233 aa, synthetic construct
  REGION 1..233: note = Synthetic
DEDIKNIVEALAHLYFLLIELFARASAAGDEELARTLKELSEEIEQEVRELAKQLKRKNPELYYQIVVTFLAASYAALIVAFAIASAAGDEELAERMKRLSEEIEQEVRELAKQLKRKNPELYYQIVVTFLAASYAALIVAFAIASAAGDEELAERMKRLSEEIEQEVRELAKQLKRKNPELYYQIVYTFLEASFRALQIALEIALKAGDRELAERMQRLSQEIVRELNELLS

SEQ ID NO: 1857 - protein, 290 aa, synthetic construct
  REGION 1..290: note = Synthetic
DEIEQHIKEWAHRLIRVVRALLEALSKRGDFEEMKRTLEEFLEQLKRSLQEWIEQAKQTGNEELIIRVIVSAIYVWAELLISVVRALLEALSKRGDFEEMKRTLEEFLEQLKRSLQEWIEQAKQTGNEELIIRVIVSAIYVWAELLISVVRALLEALSKRGDFEEMKRTLEEFLEQLKRSLQEWIEQAKQTGNEELIIRVIVSAIYVWAELLISVVRALLEALSKRGDFEEMKRTLEEFLEQLKRSLQEWIEQAKQTGNRELELHVHFSALLVRLLLELSVLHALLRARS

SEQ ID NO: 1858 - protein, 209 aa, synthetic construct
  REGION 1..209: note = Synthetic
DELEILLIIAKLILYIMKRLTKMGMDEKLYEIAKEALQRVQELVKMGDYERAKLLVELLRLLLSATEILQRMKELTKMGMDEKLYEIAKEALQRVQELVKMGDYERAKLLVELLRLLLSATEILQRMKELTKMGMDEKLYEIAKEALQRVQELVKMGDYERAHELVQLLLLLLLATEVLQKNKELTKMGMDERRFEQARRVLEDVQELV

SEQ ID NO: 1859 - protein, 253 aa, synthetic construct
  REGION 1..253: note = Synthetic
DRIEEALILVLRAIIQAEFISELMEQQGDEESYKNVKELIEILLRLLQQLKRSPSEKYARILLAVATVVLAILYALYISSQMEQQGDEESYKNVKELIEILLRLLQQLERSPSEKYARILLAVATVVLAILEALRISSEMEQQGDEESYKNVKELIEILLRLLQQLERSPSEKYARILLAVATVVLAILEALRISSEMEQQGDEESYKNVKELIEILLRLLQQLERSPSEEYAKKLQNEALQVEVILHRLHNS

SEQ ID NO: 1860 - protein, 250 aa, synthetic construct
  REGION 1..250: note = Synthetic
DEEILELLIQLRAAALIVITLAELTGDEKALEIARQLLQKALELTQNQEKIDPEELEKLLRILLLLIRLIISAIRVIERAKETGDEKALEIARQLLQKALELTQNQEKIDPEELEKLLRILLLLIRLIISAIEVIERAKETGDEKALEIARQLLQKALELTQNQEKIDPRELEHLLKILLLLIRLIISAIEVIERAKETGDEKALEIARQLLQKALELTQNQEKIDPHELYELLFRLLVRIETLILRIEN

SEQ ID NO: 1861 - protein, 250 aa, synthetic construct
  REGION 1..250: note = Synthetic
LREIERLLRQLFLSAYYVEILARLTGDEKALEIARQLLQKALELFQNQEKIDPEELEKLLRILLLLIRLIISAIRVILLAKQTGDEKALEIARQLLQKALELTQNQEKIDPEELEKLLRILLLLIRLIISAIEVIERAKETGDEKALEIARQLLQKALELTQNQEKIDPRELEILLLILLLLIRLIISAIEVIERAKETGDEKALEIARQLLQKALELTQNQEKIDPRELLELLHRLLIEIEILILRIEH

SEQ ID NO: 1862 - protein, 250 aa, synthetic construct
  REGION 1..250: note = Synthetic
DTEIRELLLELENFARLVVQLAEQTGDEKALEIARQLLQKALELTQNQEKIDPEELEKLLRILLLLIRLIISAIRVILLAEETGDEKALEIARQLLQKALELTQNQEKIDPKELELLLRILLLLIRLIISAIEVIERAKETGDEKALEIARQLLQKALELTQNQEKIDPYELYRLLEILLLLIRLIISAIEVIERAKETGDEKALEIARQLLQKALELTQNQEKIDPEELLRLLYQLLVLIRSLIQEIES

SEQ ID NO: 1863 - protein, 250 aa, synthetic construct
  REGION 1..250: note = Synthetic
LERIEKLLRLLLRFALHVIILAELTGDEKALEIARQLFQKALELTQNQEKIDPEELEKLLRILLLLIRLIISAIEVIERAKETGDEKALEIARQLLQKALELTQNQEKIDPEELEKLLRILLLLIRLIISAIEVIERAKETGDEKALEIARQLLQKALELTQNQEKIDPEELEKLLRILLLLIRLIISAIEVIERAKETGDEKALEIARQLLQKALELTQNQEKIDPEELRQLLLHLLNLIYHVITEIES

SEQ ID NO: 1864 - protein, 277 aa, synthetic construct
  REGION 1..277: note = Synthetic
DELIIEILELALQAITIMEFLLRLVKERGDERLETFERLLESIIRTIKEARELYEAGMTEELKQVLLIVKILLLAARAIYIMLQLLQIVKERGDERLETFERLLESIIRTIKEAIELWEAGMTEELKQVLLIVKILLLAAQAILIMLELLQIVKERGDERLETFERLLESIIRTIKEAIELWEAGMTRELEQVLLIVKILLLAAQAILIMLELLQIVKERGDERLETFERLLESIIRTIKEAIELWEAGMTEELEKVYIRVYELLLRAQKILEELES

SEQ ID NO: 1865 - protein, 265 aa, synthetic construct
  REGION 1..265: note = Synthetic
DELFAEAVELLVRARRYAKELLKSSNEEDQELAKKILEELRQLHERLQKVYRNGDPEQVRLMLLFVEALLLLAQATKYAQELLKSSNEEDQELAKKILEELRQLFERLVKVLRNGDPEQVRLMLLFVEALLLLAQATKYAQELLKSSNEEDQELAKKILEELRQLFERLVKVLRNGDPEQVRLMLLFVEALLLLAQATKYAQELLKSSNEEDQELAKKILEELRQLFERLVKVLRNGDPRQVRRVLLEVHLLLLIARLTLLSIEH

SEQ ID NO: 1866 - protein, 265 aa, synthetic construct
  REGION 1..265: note = Synthetic
DLLYREAEKLLFEAKLYARDLLKSSNEEDQELAKKILEELRQLFERLVKVLRNGDPEQVRLMLLFVEALLLLAQATKYAQELLKSSNEEDQELAKKILEELRQLFERLVKVLRNGDPKQVRLMLLFVEALLLLAQATKYAQELLKSSNEEDQELAKKILEELRQLFERLVKVLRNGDPRQVFLMLLFVYALLLLAQATKYAQELLKSSNERDQEIAKEILEELRQLFERLVKVLRNGDPRQVIRNLILVYALLLLAKLTKELQEL

SEQ ID NO: 1867 - protein, 253 aa, synthetic construct
  REGION 1..253: note = Synthetic
DEFEHLLELILNAIIQAENILERTKKAGDEELFEEIQRLVQTMRELFRRVHESGDPETVKFAWLLAQIALAILLALLILEETKKAGDEELFEEIQRLVQTMIELWRRVKESGDPETVKFAWLLAQIALAILKALQILEETKKAGDEELFEEIQRLVQTMIELWRRVKESGDPETVKFAWLLAQIALAILLALKILERTKKAGDEELFEEIQRLVQTMIELWRRVKESGDPETVQEAFLFAKSALLRLEHLLRN

SEQ ID NO: 1868 - protein, 271 aa, synthetic construct
  REGION 1..271: note = Synthetic
EEEMRFLLIVARILALAALLIVETAQEHGDDRLLRFAKELIRKAEEHLRRVEELAQKLEDPEKLMEALLWIALVLAIIALILVLIAQQTGDEETLKEAKELIRKAEEYLRRVEELAQKLEDPEKLMEALLWIALVLAIIALILVLIAQQTGDEETLKEAKELIRKAEEYLRRVEELAQKLEDPEKLMEALLWIALVLAIIALILVLIAQQTGDEETLKEAKELIRKAEEYLRRVEELARKLEDPRKYEKAFRWITEVRLLIYRIKVLIREQ

SEQ ID NO: 1869 - protein, 271 aa, synthetic construct
  REGION 1..271: note = Synthetic
DSEMRLLLFLALRLALLALEIVRIAQREGDEDYLKLAKELIRKAEEYLRRVEELAQKLEDPEKLMEALLWIALVLAIIALILVLIAQQTGDEETLKEAKELIRKAEEYLRRVEELAQKLEDPEKLMEALLWIALVLAIIALILVLIAQQTGDEETLKEAKELIRKAEEYLRRVEELAQKLEDPEKLMEALLWIALVLAIIALILVLIAQQTGDEETLKEAKELIRKAEEYLRRVEELARKLEDPHLYERAFLTITRVLSLIIEIRQLIEQQ

SEQ ID NO: 1870 - protein, 270 aa, synthetic construct
  REGION 1..270: note = Synthetic
RDIIEMLLQIALHLARTAHILAEAALNTGDEELFEKVKETLQRVKEILEQAKELAKKLDDPRDIIEMLLQIALVLALLAHVLAVLARTTGDERTFEEVKETLQEVKEILEQAKELAKKLDDPRDIIEMLLQIALVLALLAHVLAVLARTTGDERTFEEVKETLQEVKEILEQAKELAKKLDDPRDIIEMLLQIALVLALLAHVLAVLARTTGDERTFEEVKETLQEVKEILEQAKELAKKLDDPRDIRRMKRFILEVLIVLLLVYLVLLS

SEQ ID NO: 1871 - protein, 270 aa, synthetic construct
  REGION 1..270: note = Synthetic
SHEIEILLQEAYSAALIAHRLAVLARTTGDERTFEHVKHALQRVKELLEQAKELAKKLDDPRDIIEMLLQIALVLALLAHVLAVLARTTGDERTFEEVKETLQEVKEILEQAKELAKKLDDPRDIIEMLLQIALVLALLAHVLAVLARTTGDERTFEEVKETLQEVKEILEQAKELAKKLDDPRDIIEMLLQIALVLALLAHVLAVLARTTGDERTFEEVKETLQEVKEILEQAKELAKKLDDPRDKQRMREQIERVENLLEHVERVLAR

SEQ ID NO: 1872 - protein, 298 aa, synthetic construct
  REGION 1..298: note = Synthetic
QVLLWAALVLAHRAEQLAKIAELLLHYGDKELAKEILQQVRETAERAERLIQEVIEIARKSEDPKELMQVLLWAALVLALIALILALVAEILLKAGDKEKAKEILQQVRELAERAERLIQEVIEIARKSEDPKELMQVLLWAALVLALIALILALVAEILLKAGDKEKAKEILQQVRELAERAERLIQEVIEIARKSEDPKELMQVLLWAALVLALIALILALVAEILLKAGDKEKAKEILQQVRELAERAERLIQEVIEIARKSEDPRELHEVEKFALEVLLLILLILQLVLRIREK

SEQ ID NO: 1873 - protein, 298 aa, synthetic construct
  REGION 1..298: note = Synthetic
QVLLRQAHKIARVAEHIAYVAEALFELGDKERAKEHLQEVRELAEKAERLIQEVIEIARKSEDPKELMQVLLWAALVLALIALILALVAEILLKAGDKEKAKEILQQVRELAERAERLIQEVIEIARKSEDPKELMQVLLWAALVLALIALILALVAEILLKAGDKEKAKEILQQVRELAERAERLIQEVIEIARKSEDPKELMQVLLWAALVLALIALILALVAEILLKAGDKEKAKEILQQVRELAERAERLIQEVIEIARKSEDPHEEYEVLQFALEVLRLILLIRQLVIRIEQS

SEQ ID NO: 1874 - protein, 298 aa, synthetic construct
  REGION 1..298: note = Synthetic
QVLLWAALHLAHQAELLAKVAELLLRVGDKELAKRILQRVRETAERAERLIQEVIEIARKSEDPKELMQVLLWAALVLALIALILALVAEILLKAGDKEKAKEILQQVRELAERAERLIQEVIEIARKSEDPKELMQVLLWAALVLALIALILALVAEILLKAGDKEKAKEILQQVRELAERAERLIQEVIEIARKSEDPKELMQVLLWAALVLALIALILALVAEILLKAGDKEKAKEILQQVRELAERAERLIQEVIEIARKSEDPKEEQRVLQWANEVRYLILHIEYLVLQIELS

SEQ ID NO: 1875 - protein, 277 aa, synthetic construct
  REGION 1..277: note = Synthetic
DLLIHKILRLALEAIVIMILLLEIVKRRGDERLETFERLLESIIRTIKEARELFEAGMTEELKQVLLIVKILLLAAQAIEIMLELLQIVKERGDERLETFERLLESIIRTIKEAIELWEAGMTEELKQVLLIVKILLLAAQAILIMLELLQIVKERGDERLETFERLLESIIRTIKEAIELWEAGMTEELKQVLLIVKILLLAAQAILIMLELLQIVKERGDERLETFERLLESIIRTIKEAIELWEAGMTQELREVYSEVYHLLNLARSLLLRLEN

SEQ ID NO: 1876 - protein, 246 aa, synthetic construct
  REGION 1..246: note = Synthetic
DEQLRDFREARLLVQQLEVNARFAGDEEILEFARQVSQKIKELLELLEQGDPQALRELKQLIDFLRAMILVVELLILASKAGDEEILEFARQVSQKIKELLELLEQGDPQALRELKQLIDFLRAMILVVELLLLAKEAGDEEILEFARQVSQKIKELLELLEQGDPQALRELKQLIDFLEAMILVVELLLLAKEAGDEEILEFARQVSQKIKELLELLEQGDPQARRELNKLIEELNRFLVEVRFL

SEQ ID NO: 1877 - protein, 221 aa, synthetic construct
  REGION 1..221: note = Synthetic
DELDRLAYRILQLVLEIELLAKLSGDERFSQLAKEAEERVKEIQERGDKEELELLLLALQIILLVLKILKLARLSGDERFSQLAKEAMERVKEIQERGDKEELELLLLALQIILLVLKILKLARLSGDERFSQLAKEAMERVKEIQERGDKEELELLLLALQIILLVLKILKLARLSGDERFSQLAKEAMERVKEIQERGDKEELEQLRRFLERLFLELES

SEQ ID NO: 1878 - protein, 254 aa, synthetic construct
  REGION 1..254: note = Synthetic
DELEIKAQRLANEALALVLDVESFARRHGDEELSELAKELLEKILEILQRFRETGDPQMLLQIKAVWLAVEAIALVAHVLFIARQHGDEELSELAKELLEKILEILQRFRETGDPQMLLQIEAVWLAVEAIALVALVLQYARKHGDEELSELAKELLEKILEILQRFRETGDPQMLLQIEAVWLAVEAIALVAVVLEYARKHGDEELSELAKELLEKILEILQRFRETGDPQMLEQIFQVFLQVLLIAYQAVRL

SEQ ID NO: 1879 - protein, 219 aa, synthetic construct
  REGION 1..219: note = Synthetic
DDRIDEIRLLLEQVLTTAKSAGDEEIFQLAQELAQLIKEAKERGDFELMERVLRIVQILLTLAKVLLTARKAGDEEIFQLAQELAQLIKEAKERGDFELMERVLFIVRILLTLAKVLLTAKEAGDEEIFQLAQELAQLIKEAKERGDFELMQRVLFIVLILLTLAKVLLTAKEAGDEEIFQLAQELAQLIKEAKERGDEELMARVLIIVFRLLLRAELS

SEQ ID NO: 1880 - protein, 238 aa, synthetic construct
  REGION 1..238: note = Synthetic
SELELTIRIAETLLQALHILAHHLGDEKVLEIVQRLIQLLEEAFRHRSDEKAREQLEEIMRIAEALYILLLLFLIALLLGDEKVLEIVQRLIQLLEEAFRHRSDEKAREQLERIMYIAEALLILLQLYKTAKELGDEKVLEIVQRLIQLLEEAFRHRSDRKARRTLVLIYLIALALLILLQLYKIAKRLGDEKVLEIVQRLIQLLEEAFRHRSDEKAEEQLLRIWSIAIRLLLRLYES

SEQ ID NO: 1881 - protein, 250 aa, synthetic construct
  REGION 1..250: note = Synthetic
SRFEVLVTRVDALASFVETLAKHLGDETLRRIVQFIKQLIQKAIELYEAGDIEEAKEYLRIASEIAKVAVLAALVLLLIQLLGDETLRRIVQFIMQLIQKAIELYEAGDIEEAKRYLLIASLIAKVALLAAEVLRLIQELGDETLRRIVQFIMQLIQKAIELYEAGDEEEALRYLLIASLIASVALLAAEVLRLIQELGDETLRRIVQFIMQLIQKAIELYEAGDEEEALKILAEAFVLALRALVEAHIS

SEQ ID NO: 1882 - protein, 219 aa, synthetic construct
  REGION 1..219: note = Synthetic
DEETFRAFELVTLVRLLAEFLGDEEITQTAKEIEEELRRAYEAGDFETMQQLLETLEALWWVLEVIHLALQLGDEEITQTAKEISEELKRAKEAGDFETMQQLLETLEALWWVLEVIRLAQELGDEEITQTAKEISEELKRAKEAGDFETMQQLLRTLEALWNVLEVIRLAQELGDEEITQTAKEISEELKRAKEAGDHETMEELLLELLKLIHRLRLS

SEQ ID NO: 1883 - protein, 219 aa, synthetic construct
  REGION 1..219: note = Synthetic
DEETLRAEFLVRLVEILARRLGDEEITQTAKEISEELKRAKEAGDFETMQQLLETLEALWWVLEVIRLAQELGDEEITQTAKEISEELKRAKEAGDFETMQQLLETLEALWWVLEVIRLAQELGDEEITQTAKEISEELKRAKEAGDFETMQQLLLTLEALWHVLEVIRLAQELGDEEITQTAKEISEELKRAKEAGDEETMQRLLVELEANITQLRLS

SEQ ID NO: 1884 - protein, 246 aa, synthetic construct
  REGION 1..246: note = Synthetic
SELEELILRAEHLIELVLLYARETGNEEAHEIAQRMLELVKKAEELHDVDREKAREIIQLVSLILKAILLILQVLLHARETGNEEAHEIAQRMLELVKKAEELHDVDREKARKIIHLVSLILKAILLILQVLKHARETGNEEAHEIAQRMLELVKKAEELHDVDEQKAEKIIRLVSLILKAILLILQVLKHARETGNEEAHEHAQRMLELVKKAEELHDVDEERALEIIARVLTLLEHVLKQLQQL

SEQ ID NO: 1885 - protein, 246 aa, synthetic construct
  REGION 1..246: note = Synthetic
SELERLLTEALQLINEVKYFARETGNEEAHEIAQRMLELVKKAEELHDVDREKAREIIQLVSLILKAILLILQVLKHARETGNEEAHEIAQRMLELVKKAEELHDVDREKAREIIQLVSLILKAILLILQVLKHARETGNEEAHEIAQRMLELVKKAEELHDVDREKAREIIQLVSLILKAILLILQVLKHARETGNEEAHEIAQRMLELVKKAEELHDVDREKARKIILEVLVILIYILIQLRIS

SEQ ID NO: 1886 - protein, 155 aa, synthetic construct
  REGION 1..155: note = Synthetic
DSERHEAEALVLLLELVYKYLGDSTFQELARRLLEVLKRGDDEQIRRMSEQAQAALLVFKLHEVYKYLGDSTFQELARRLLEVLKRGDDEQIRRMSLQAFAALLVFLLFEVYKYLGDSTFQELARRLLEVLKRGDREKILHNSYLAFRALTKFLR

SEQ ID NO: 1887 - protein, 207 aa, synthetic construct
  REGION 1..207: note = Synthetic
DRLRYHALILALLVELLAKENGQEEFEETVQEMFRRVEKAGDEEEIQWIILLLIALFLALEVLRLAKENGQEEFEETVQEMFRRVKKAGDEEEIQWIILLLIALFLALEVLRLAKENGQEEFEETVQEMFRRVKKAGDEEEIQWIILLLIALFLALEVLRLAKENGQEEFEETVQEMFRRVKKAGDEQEIREIIFFLRLLFDRLERL

SEQ ID NO: 1888 - protein, 247 aa, synthetic construct
  REGION 1..247: note = Synthetic
DDELKELVVRALYLAVELLKLAKEAGNEEFLEHARRMEQTIKEVQELSRKNPEEAKELIQLAILILRALILAVILLKLAKEAGNEEFLEHARRMVQTIKEVQELSRKNPEEAKELIQLAILILRALILAVILLKLAKEAGNEEFLEHARRMVQTIKEVQELSRKNPEEAKELIQLAILILRALILAVILLKLAKEAGNEEFLEHARRMVQTIKEVQELSRKNPLEARLLIREAILHLHNLIIRVRHL

SEQ ID NO: 1889 - protein, 221 aa, synthetic construct
  REGION 1..221: note = Synthetic
SELEKLIYKIRQLILEAELLAKEAGNEEAMEMVRQLIELVKKAKEAGDKETLELAILIIIIIILIVIALELARQAGNEEAMEMVRQLIELVKKAKEAGDKETLELAILIIIIIILIVIALELARQAGNEEAMEMVRQLIELVKKAKEAGDKETLELAILIIIIIILIVIALELARQAGNEEAMEMVRQLIELVKKAKEAGDKETLKRAELIIRIIILEVRL

SEQ ID NO: 1890 - protein, 221 aa, synthetic construct
  REGION 1..221: note = Synthetic
SELEKLIREIELLIDEARIIAERAGNEEAMEMVRQLIELVKKAKEAGDKETLELAILIIIIIYLIVRALLLAREAGNEEAMEMVRQLIELVKKAKEAGDKETLELAILIIIIIILIVIALELARQAGNEEAMEMVRQLIELVKKAKEAGDHETLYLAILIIIIIILIVIALELARQAGNEEAMEMVRQLIELVKKAKEAGDFRTLLQALVIILEIIQEVRS

SEQ ID NO: 1891 - protein, 251 aa, synthetic construct
  REGION 1..251: note = Synthetic
DELEVEVIYIILLIEIIIKRLKQQGDEESAKKLEEILQQIIEELQRVRESGDPEELELILLLALVALIIAKIMLIITRLKQQGDEESAKKLEEILQQIIEELQRVRESGDPEELELILLLALVALIIAKIMLIITRLKQQGDEESAKKLEEILQQIIEELQRVRESGDPEELELILLLALVALIIAKIMLIITRLKQQGDEESAKRLEELLQQIIEELQRVRESGDPRELYHIYALALSALLDAEILLRET

SEQ ID NO: 1892 - protein, 256 aa, synthetic construct
  REGION 1..256: note = Synthetic
DEIERLFEILLQLIVIIELLAYRAKLMGDEEAFEEMRRLVEEAKRLLEQAKRSTDPEEIKILTLLAILLSLVVQILYYATQAKLMGDEEAFEEMRRLVEEAKRLLEQAKRSTDPEEIKILTLLAILLSLVVQILYYATQAKLMGDEEAFEEMRRLVEEAKRLLEQAKRSTDPEEIKILTLLAILLSLVVQILYYATQAKLMGDEEAFEQMRRLVEEAKRLLEQAKRSTDPKEILHLTILAESLSYEVRRLYELFRS

SEQ ID NO: 1893 - protein, 256 aa, synthetic construct
  REGION 1..256: note = Synthetic
DDITKLLTILYILILIIEDLARKAKLMGDEEAFEEMRRLVEEAKRLLEQARRSTDPEEIKILTLLAILLSLVVQILYYATQAKLMGDEEAFEEMRRLVEEAKRLLEQAKRSTDPEEIKILTLLAILLSLVVQILYYATQAKLMGDEEAFEEMRRLVEEAKRLLEQAKRSTDPEEIKILTLLAILLSLVVQILYYATQAKLMGDERAFEFMRRLVELAKRLLEQAKRSTDPLEILELTLLAESLSYVVRVLYRETQA

SEQ ID NO: 1894 - protein, 256 aa, synthetic construct
  REGION 1..256: note = Synthetic
SRIELLLEILEQLIDIILVLAYQAKQMGDEEAFEEMRRLVEEAQRLLEQAKRSTDPEEIKILTLLARLLSLVVQILYYATQAKLMGDEEAFEEMRRLVEEAKRLLEQAKRSTDPEEIKILTLLAILLSLVVQILYYATQAKLMGDEEAFEEMRRLVEEAKRLLEQAKRSTDPEEIKILTLLAILLSLVVQILYYATLARLMGDEEAFEEMRRLVEEAKRLLEQAKRSTDPEEIKRLTKKALQLSSRVFVIYQFFLS

SEQ ID NO: 1895 - protein, 285 aa, synthetic construct
  REGION 1..285: note = Synthetic
SLETRALTLLRLAIELLRQVALEISQFYKETGDPLAQELTELVREAIELALEAARQLANNPGEEYFLVAVAIALLIDAIAELIFVALEISQFYKETGDPLAQELTELVREAIELALEAARQLANNPGEEYFLVAVAIALLILAIAELIKVALEISQFYKETGDPLAQELTELVREAIELALEAARQLANNPGEEYFLVAEAIALLILAIAELIKVALEISQFYKETGDPLAQELTELVREAIELALEAARQLANNPGEEYYRVAFEIALHILVIAERIKIELRLS

SEQ ID NO: 1896 - protein, 227 aa, synthetic construct
  REGION 1..227: note = Synthetic
DDELRQVLLLILYHLHEIEYSLEKAKKQGDEELLREMRENAQLAKELFEEVRRATDPREVQLLLVLVQILWYIIEILKSLYEAKQQGDEELLREMRENAQLAKELFEEVRRATDPREVQLLLVLVQILWYIIEILKSLYEAKQQGDEELLREMRENAQLAKELFEEVRRATDPREVRELLQLVQILWQIIELLKQLYEAKQLGDERRLKRLRRLAELAKLLFESLRS

SEQ ID NO: 1897 - protein, 227 aa, synthetic construct
  REGION 1..227: note = Synthetic
EVQLLLVLEQIIEYIIHILKSLHFAEFQGDEELLREMRENAQLARELYEEVRRATDPREVQLLLVLVQILWYIIEILKSLYEAKKQGDEELLREMRENAQLAKELFEEVRRATDPREVQLLLVLVQILWYIIEILKSLYEAKQQGDEELLREMRENAQLAKELFEEVRRATDPREVQLLLVLVQILWLIIEDLKRLYEAKQEGDEDLFRVLKELAEIAKKRFEEVRR

SEQ ID NO: 1898 - protein, 177 aa, synthetic construct
  REGION 1..177: note = Synthetic
DELELEAKFLAEVLQLLYERLKRGLDEETLEIIQRLVQFILEVVKTGDKELIKKAILMAQAAILAIELQRLYEELKRGLDEETLEIIQRLVQFILEVVKTGDKELIKKAILMAQAAILAIELQRLYEELKRGLDEETLEIIQRLVQFILEVVKTGDKHLIEKAITDALYAHFLIRLS

SEQ ID NO: 1899 - protein, 257 aa, synthetic construct
  REGION 1..257: note = Synthetic
DLEIHHALNLILEAERIALQFILEAKEAGDEEFIRQMQELVEKIKRLFEEVRRATSEEEVKIALALVQIALAILKALQFILEAKEAGDEEFIRQMQELVEKIKRLFEEVRRATSEEEVKIALALVQIALAILKALQFILEAKEAGDEEFIRQMQELVEKIKRLFEEVRRATSEEEVKIALALVQIALAILKALQFILEAKEAGDEEFIRQMQELVEKIKRLFEEVRRATSETEVEIALLQVYIALLILELLQERLES

SEQ ID NO: 1900 - protein, 257 aa, synthetic construct
  REGION 1..257: note = Synthetic
EVKIELALRQILRALLEALYFVYVAKEAGDEEFIRQMQELVEKIKRLYEEVRRATSEEEVKIALALVQIALAILKALQFILEAKEAGDEEFIRQMQELVEKIKRLFEEVRRATSEEEVKIALALVQIALAILKALQFILEAKEAGDEEFIRQMQELVEKIKRLFEEVRRATSEEEVKIALALVQIALAILKALQFILEAKEAGDEEFIRQMQELVEKIKRLFEEVRRATSEHEVFHALVLVRRALDILRYLQVELEL

SEQ ID NO: 1901 - protein, 254 aa, synthetic construct
  REGION 1..254: note = Synthetic
DFQEEVFELLVHIFNLIYEALVRAKNMGDEETTEKIRRILEQVKEMIERARKSTTPEELFALLVFALLALIYIQILLALVKAQQMGDEETTEKIRRILEQVKEMLERAKKSTTPEELFALLVFALLALIYIQILLALVKAQQMGDEETTEKIRRILEQVKEMLERAKKSTTPEELFALLVFALLALIYIQILLALVKAQQMGDEETTEKIRRILEQVKEMLERAKKSTTPEELRQLLLFAEDALYHIRFLLLRV

SEQ ID NO: 1902 - protein, 254 aa, synthetic construct
  REGION 1..254: note = Synthetic
DDLAHEVYALILRIIELALWLQWQFKEAGDEESTEKVQRMIEELQKVLERARKTTDPRELFAALVVAQIALIILLALWLQWQFKEAGDEESTEKVQRMIEELQKVLERAAKTTDPRELFAALVVAQIALIILLALWLQWQFKEAGDEESTEKVQRMIEELQKVLERAAKTTDPRELFAALVVAQIALIILLALWLQWQFKEAGDEESTEKVQRAIEELQKVLERAAKTTDPRELRRALVQALAALFQLEYLHLS

SEQ ID NO: 1903 - protein, 254 aa, synthetic construct
  REGION 1..254: note = Synthetic
DEFAIEVYLFILRIILLARLLQRRFKEAGDEESTEKVQRMIEELQKVLERARKTTDPRELFAALVVAQIALIILLALWLQWQFKEAGDEESTEKVQRMIEELQKVLERAAKTTDPRELFAALVVAQIALIILLALWLQWQFKEAGDEESTEKVQRMIEELQKVLERAAKTTDPRELFAALVVAQIALIILLALWLQWQFKEAGDEESTEKVQRMIEELQKVLERAAKTTDPRELFRALEVARRALNELEYLWRS

SEQ ID NO: 1904 - protein, 253 aa, synthetic construct
  REGION 1..253: note = Synthetic
SEAEEVFNFIHEIFIRVKEVQHQMKRAGDEEAFERIQRILEKIEEILERAKQSTDPEELFALYVVAFIAQIYIQVLQVQHQMKRAGDEEAFERIQRILEKIEEILERAKQSTDPEELFALYVVAFIAQIYIQVLQVQHQMKRAGDEEAFERIQRILEKIEEILERAKQSTDPEELFALYVVAFIAQIYIQVLQVQHQMKRAGDEEAFERIQRILEKIEEILERAKQSTDPRELRRLHLIALEALVHIEILQVS

SEQ ID NO: 1905 - protein, 253 aa, synthetic construct
  REGION 1..253: note = Synthetic
SFAEHVFRFIYRIFHEVKLVQEEMKRAGDEEAFERIQRILEKIEEILERARQSTDPEELFALYVVAFIAQIYIQVLQVQHQMKRAGDEEAFERIQRILEKIEEILERAKQSTDPEELFALYVVAFIAQIYIQVLQVQHQMKRAGDEEAFERIQRILEKIEEILERAKQSTDPEELFALYVVAFIAQIYIQVLQVQHQMKRAGDEEAFERIQRILEKIEEILERAKQSTDPKELLELYYIAEEALLFIKLLKLR

SEQ ID NO: 1906 - protein, 253 aa, synthetic construct
  REGION 1..253: note = Synthetic
LFAEYVFQFIDEIFFHVQAVLFQMKEAGDEEAFERIQRILEKIEEILERARQSTDPEELFALYVVAFIAQIYIQVLLVQHEMKRAGDEEAFERIQRILEKIEEILERAKQSTDPEELFALYVVAFIAQIYIQVLQVQHQMKRAGDEEAFERIQRILEKIEEILERAKQSTDPEELLALYVVAFIAQIYIQVLQVQHQMKRAGDEEAFERIQRILEKIEEILERAKQSTDPHELLELYRIAQEALVFIEFLLLH

SEQ ID NO: 1907 - protein, 253 aa, synthetic construct
  REGION 1..253: note = Synthetic
SFARYVFRFIYRIFQDVKLVQHEMKRAGDEEAFERIQRILEKIEEILERAKQSTDPEELFALYVVAFIAQIYIEVLLVQHHMKRAGDEEAFERIQRILEKIEEILERAKQSTDPEELLALYVVAFIAQIYIQVLEVQHQMKRAGDEEAFERIQRILEKIEEILERAKQSTDPRELFALYVVAFIAQIYIQVLQVQHQMKRAGDEEAFEEIQRILEKIEEILERAKQSTDPRELVKLYAIAVEALLYIRLSQES

SEQ ID NO: 1908 - protein, 253 aa, synthetic construct
  REGION 1..253: note = Synthetic
DEADHVHAYIFHILIEVEIVLKQMKRAGDEEAFERIQRILEKIEEILERARQSTDPEELFALYVVAFIAQIYIQVLQVQHQMKRAGDEEAFERIQRILEKIEEILERAKQSTDPEELFALYVVAFIAQIYIQVLQVQHQMKRAGDEEAFERIQRILEKIEEILERAKQSTDPEELFALYVVAFIAQIYIQVLQVQHQMKRAGDEEAFERIQRILEKIEEILERAKQSTDPHELHRLKLIAEEALIFIRRLQFH

SEQ ID NO: 1909 - protein, 177 aa, synthetic construct
  REGION 1..177: note = Synthetic
SVLENIALSLASQLQTLFELLKRGLDEETLEIIQRLVQFILEVVKTGDEELIRKAILMAQAAILAIILQDLFEELKRGLDEETLEIIQRLVQFILEVVKTGDKRLIEEAINMALAALLAIELQRLYEELKRGLDEETLEIIQRLVQFILEVVKTGDLELILQAIALALLALLKITHS

SEQ ID NO: 1910 - protein, 226 aa, synthetic construct
  REGION 1..226: note = Synthetic
SETEILISQAETLVTEIYSLAEEAGNEELREIAKELLRSILELFRTWQSGKQDPEEMKEKLETVFLILQAVLLVAKIYLNAQKAGNEELLEIAKELLRSILELFRTWQSGKQDPEEMKEKLETVFLILQAVLLVAKIYLIAQKAGNEELLEIAKELLRSILELFRTWQSGKQDPEEMKEKLRRVFLILLLVLAVAQLFLNALLLGNERLQELAKEVLEEILRFFRT

SEQ ID NO: 1911 - protein, 229 aa, synthetic construct
  REGION 1..229: note = Synthetic
DEEDELRILLQKIELLARRLLRLAKQAGDEEIFQTAREVMETARELLERIKRLKITPEQFLQIQLLILLLEIVVEALRLLLLAKQAGDEEIFQTAREVMETARELLERIKRLKITPEQFLQIQLLILLLEIVVEALRLLLLAKQAGDEEIFQTAREVMETARELLERIKRLKITPEQFFHIHLLIQLLELVVEALRILLEAKQEGDERKFQLARRLMESARELLEETKR

SEQ ID NO: 1912 - protein, 229 aa, synthetic construct
  REGION 1..229: note = Synthetic
DLQRELELLLRQIRLLAERLLDLAKRAGDEEIFQTAREVMETARELLERIKRLKITPEQFLQIQLLILLLEIVVEALRLLLLAKQAGDEEIFQTAREVMETARELLERIKRLKITPEQFLQIQLLILLLEIVVEALRLLLLAKQAGDEEIFQTAREVMETARELLERIKRLKITPEQFLQIQRLIRLLEVVVYALRLLLEAKQDGDEEFHQSARQLMETARRLLEEIKR

SEQ ID NO: 1913 - protein, 212 aa, synthetic construct
  REGION 1..212: note = Synthetic
SRELRIELLLELLERLIRHVSELAQKAGDEEMKRLVQQARELAQEARELFEEAKQLDRQELHKFLFLVEIILTLAQLLVEIITVSILAQKAGDEEMKRLVQQARELAQEARELFEEAKQLDREELKRALLLVLIILLLALLLVEIIQVSIYAQEQGDERQKRLVQKARELAQEARELFEEAKQLDDEELEKFLEEVLRILTQAFFLVLVIRA

SEQ ID NO: 1914 - protein, 254 aa, synthetic construct
  REGION 1..254: note = Synthetic
DREAIETILHAITLVEHAIRLAKQNGDEEIIEELRKLLEVLQEMLRQIRKAKSEEDFKQAIAVATIISAIVLVLIAILLAKQNGDEEIIEELRKLLEVLQEMLRQILKAKSEEDFKQAIAVATIISAIVLVLIAILLAKQNGDEEIIEELRKLLEVLQEMLRQILKAKSEEDFKQAIAVATIISAIVLVLIAILLAKQNGDERIIEKLRKLLEVLQEMLRQILKAKSEEDFKQAIEVARHIFALVQLLIDDLKS

SEQ ID NO: 1915 - protein, 254 aa, synthetic construct
  REGION 1..254: note = Synthetic
DIEAILFILHALLLVEHAIRLAKQNGDEEIIEELRKLLEVLQEMLRQIRKAKSSEDYFRALAVATIIRAIVLVLIAILLAKQNGDEEIIEELRKLLEVLQEMLRQILKAKSKEDFKQAIAVATIISAIVLVLIAILLAKQNGDEEIIEELRKLLEVLQEMLRQILKAKSEEDFKQAIAVARIISAIVLVLIAILLAKQHGDEEIIEILRKLLEELQEMLRQILKAKSEEDFKRALKVALAIYNIVLELIEILRT

SEQ ID NO: 1916 - protein, 198 aa, synthetic construct
  REGION 1..198: note = Synthetic
SEHQEAEALILKMERLVALVLLLAKQEGDEEISRIAQEAYEILRKAYELLKRSTNPETLETILALILIAQMLLLVALVLLLAKQEGDEEISRIAQEAYEILRKAYELLKRSTNPETLETILALILIAQMLLLVALVLLLAKQEGDEEISRIAQEAYEILRKAYELLKRSTNPKVLLRIELLILEAYILLERARYLLRH

SEQ ID NO: 1917 - protein, 288 aa, synthetic construct
  REGION 1..288: note = Synthetic
SKLEEVLVRVERAIEELRIAILLASELYERTGDPKAQEIFELMLEFIRLLSEIAKEVKQAGDEEYIQTLKVLVLVALAAAQLAIAILLASELYERTGDPKAQEIFELMLEFIRLLSEIAKEVKQAGDEEYIQTLKVLVLVALAAAQLAIAILLASELYERTGDPKAQEIFELMLEFIRLLSEIAKEVKQAGDEEYIQTLKVLVLVALAAAQLAIAILLASELYERTGDPKAQEIFELMLEFIRLLSEIAKEVKQAGDEEYIYRLRKLVLEAFNAALHAKLDLELSEHS

SEQ ID NO: 1918 - protein, 270 aa, synthetic construct
  REGION 1..270: note = Synthetic
DEKELRARILIQLIEDLIKLLLRHAGTDEESQKLAQRLLEILKRLLEILIRAVEEGDPEKVELVLKMLQAVILIIEIFHLIQELLEKAGTDEESQKLAQRLLEILKRLLEILIRAVEEGDPEKVELVLKMLQAVILIILIFLLIQELLEKAGTDEESQKLAQRLLEILKRLLEILIRAVEEGDPEKVELVLKMLQAVILIILIFLLIQELLEKAGTDEESQKLAQRLLEILKRLLEILIRAVEEGDPRKVRQVFLLLLRVRNTIEEFKVS

SEQ ID NO: 1919 - protein, 270 aa, synthetic construct
  REGION 1..270: note = Synthetic
DELEIRARTLIELIEVLIRRLLEKAGTDEESQKLAQRLLEILKRLLEILIRAVEEGDPEKVELVLKMLQAVELIILIFLLIQELLEKAGTDEESQKLAQRLLEILKRLLEILIRAVEEGDPEKVELVLKMLQAVILIILIFLLIQELLEKAGTDEESQKLAQRLLEILKRLLEILIRAVEEGDPEKVELVLKMLQAVILIILIFLLIQELLEKAGTDEESQKLAQRLLEILKRLLEILIRAVEEGDPKKVLEVYSNLLRVEALIRLFLLS

SEQ ID NO: 1920 - protein, 205 aa, synthetic construct
  REGION 1..205: note = Synthetic
DRLDQLLAEAYYIVLLVERAGDPELIRLAKELTQLIREAVENGDWWLARLVLLVLLAIEIILRVQEAGDPELIRLAKELMQLIKEATENGDWWLARLVLLVLLAISIILQVQEAGDPELIRLAKELMQLIKEATENGDWWLAHLVLLVLLAISIILQVQEAGDPELIRLAKELMQLIKEATENGDDELAFKVLLQLLVIRHLLEH

SEQ ID NO: 1921 - protein, 241 aa, synthetic construct
  REGION 1..241: note = Synthetic
DELERILLEILEIIVTLKEIMKKTNDEENSREIEEIARKVKELVEEAERSGDPKTFQLILILAQILLIFAQLLLIMQKTNDEENSREIEEIARKVKELVEEAERSGDPKTFQLILILAQILLIFAQLLLIMQKTNDEENSREIEEIARKVKELVEEAERSGDPKTFQLILILAQILLIFAQLLLIMQKTNDEENSREIEEIARKVKELVEEAERSGDPKTFEHVLLEAEYLLLRAEILLHS

SEQ ID NO: 1922 - protein, 241 aa, synthetic construct
  REGION 1..241: note = Synthetic
DELIHILEQIHHIFAQLFSILLQTNDEENSREIEEIARKVKELVEEAERSGDPKTFQLILILAQILLIFAQLLLIMQKTNDEENSREIEEIARKVKELVEEAERSGDPKTFQLILILAQILLIFAQLLLIMQRTNDEENSREIEEIARKVKELVEEAERSGDPKTFRLILILAQILLIFAQLLLIMQRTNDEENSREIEEIARKVKELVEEAERSGDPRTFREILTIARQLLVRAESLLES

SEQ ID NO: 1923 - protein, 254 aa, synthetic construct
  REGION 1..254: note = Synthetic
SEIEQLLADLFKLMAEILRIAEEIKKAGDEESYEQVRRIFEKIKELLQRAEETGDPRTLEIVWFLAQLAYLMVQILLIALEIKKAGDEESYEQVRRIFEKIKELLQRAEETGDPRTLEIVWFLAQLAYLMVQILLIALEIKKAGDEESYEQVRRIFEKIKELLQRAEETGDPRTLEIVWFLAQLAYLMVQILLIALEIKKAGDEESYEQVRRHFEKIKELLQRAEETGDPKFLRLVFEQAQVAHLQVEILLNRL

SEQ ID NO: 1924 - protein, 254 aa, synthetic construct
  REGION 1..254: note = Synthetic
LEIERFLHELYRLLFEIQFIARQIKRAGDEESYEQVRRIFEKIKELLQRAEETGDPRTLEIVWFLAQLAYLMVQILLIALEIKKAGDEESYEQVRRIFEKIKELLQRAEETGDPRTLEIVWFLAQLAYLMVQILLIALEIKKAGDEESYEQVRRIFEKIKELLQRAEETGDPRTLEIVWFLAQLAYLMVQILLIALEIKKAGDEESYEQVRRIFEKIKELLQRAEETGDPRTLRRVFALALHAYDYVRILLEEL

SEQ ID NO: 1925 - protein, 257 aa, synthetic construct
  REGION 1..257: note = Synthetic
DELEEIELRILIIFHLIRRYARQVQKAGDDESAEKIRELAERVKELAERAKQTGDPETAELMLILAQILLILVQILFYAVQVQKAGDDESAEKIRELAERVKELAERAKQTGDPETAELMLILAQILLILVQILFYAVQVQKAGDDESAEKIRELAERVKELAERAKQTGDPETAELMLILAQILLILVQILFYAVQVQKAGDDESAEKIRELAERVKELAERAKQTGDPHHARRLLIEALLLLVEVEQIFEEVQVQ

SEQ ID NO: 1926 - protein, 257 aa, synthetic construct
  REGION 1..257: note = Synthetic
DELERIHLRILEIYNLINEYALRVQELGDDESAEKIRELAERVKELAERAKQTGDPETAELMLILAQILLILVQILFYAVQVQKAGDDESAEKIRELAERVKELAERAKQTGDPETAELMLILAQILLILVQILFYAVQVQKAGDDESAEKIRELAERVKELAERAKQTGDPETAELMLILAQILLILVQILFYAVQVQKAGDDESAEKIRELAERVKELAERAKQTGDPETARRALLLARLLLLEVEYLFLEVHLS

SEQ ID NO: 1927 - protein, 257 aa, synthetic construct
  REGION 1..257: note = Synthetic
DELERIHHLIKHIFHLIEHYAFEVQQAGDDESAEKIRELAERVKELAERAKQTGDPETAELMLILAQILLILVQILFYAVQVQKAGDDESAEKIRELAERVKELAERAKQTGDPETAELMLILAQILLILVQILFYAVQVQKAGDDESAEKIRELAERVKELAERAKQTGDPETAELMLILAQILLILVQILFYAVQVQKAGDDESAEKIRELAERVKELAERAKQTGDPETARRNLERAEALLYRVQAIFIEVKLS

SEQ ID NO: 1928 - protein, 257 aa, synthetic construct
  REGION 1..257: note = Synthetic
DELEEIHARILLIHLEIRRYARQVQKAGDDESAEKIRELAERVKELAERAKQTGDPETAELMLILAQILLILVQILFYAVQVQKAGDDESAEKIRELAERVKELAERAKQTGDPETAELMLILAQILLILVQILFYAVQVQKAGDDESAEKIRELAERVKELAERAKQTGDPETAELMLILAQILLILVQILFYAVQVQKAGDDESAEKIRELAERVKELAERAKQTGDPETARINLQRAEILLLKVEQLFREVRRQ

SEQ ID NO: 1929 - protein, 257 aa, synthetic construct
  REGION 1..257: note = Synthetic
DELYEIIIRIRIILLLIELYAYQVQVAGDDESAEKIRELAERVKELAERAKQTGDPETAELMLILAQILLILVQILFYAVQVQKAGDDESAEKIRELAERVKELAERAKQTGDPETAELMLILAQILLILVQILFYAVQVQKAGDDESAEKIRELAERVKELAERAKQTGDPETAELMLILAQILLILVQILFYAVQVQKAGDDESAEKIRELAERVKELAERAKQTGDPETARRMLSLALHLLLEVKIIFERVQVQ

SEQ ID NO: 1930 - protein, 282 aa, synthetic construct
  REGION 1..282: note = Synthetic
DLELERLELEIRILVERVYRLAVELQQQGNEESFEKAVEFVKQILELVRRAFEYFEAGKTEEAEKILRLALLMIQILLLVLQVYRLAVELQQQGNEESFEKAVEFVKQILELVRRAFEYFEAGKTEEAEKILRLALLMIQILLLVLQVYRLAVELQQQGNEESFEKAVEFVKQILELVRRAFEYFEAGKTEEAEKILRLALLMIQILLLVLQVYRLAVELQQQGNEESFEKAVEFVKQILELVRRAFEYFEAGKTHRAEEILYHALALIQSLLFRLEVRRRE

SEQ ID NO: 1931 - protein, 222 aa, synthetic construct
  REGION 1..222: note = Synthetic
DKLEELIIKAESLIKLAKFLARRLGDQEFMEVAREVMEFLLQALREGDMELVKLIYLIASALLLILKAIQLAKQLGDQEFMEVAREVMEFLLQALREGDMELVKLIYLIASALLLILKAIQLAKQLGDQEFMEVAREVMEFLLQALREGDMELVKLIYLIASALLLILKAIQLAKQLGDQEFMEVAREVMEFLLQALREGDMELVRHIFYFATRLLLELEHS

SEQ ID NO: 1932 - protein, 269 aa, synthetic construct
  REGION 1..269: note = Synthetic
SELTQLLSIAEELTREVLLIYILLKRLADDEEFLRRAEELLQLMLEILEKAREAAERGDPKQVLLLILIAIAIWLVFEVLLIYILLKRLADDEEFLRRAEELLQLMLEILEKAIEATQRGDPKQVLLLILIAIAIWLVFEVLLIYILLKRLADDEEFLRRAEELLQLMLEILEKAIEATQRGDPKQVLLLILIAIAIWLVFEVLLIYILLKRLADDERLLRLAEEFLQLMLEILEIAIEATQRGDPHQVRVAINLAILIYLFFRHLLDL

SEQ ID NO: 1933 - protein, 269 aa, synthetic construct
  REGION 1..269: note = Synthetic
SELEELIALAAFLITLVKFIYQHLKRLADDEEFLRRAEELLQLMLEIYEKAEEASQRGDPKQVKLLILIAIAIFLVFEVLLIYILLKRLADDEEFLRRAEELLQLMLEILEKAIEATQRGDPKQVLLLILIAIAIWLVFEVLLIYILLKRLADDEEFLRRAEELLQLMLEILEKAIEATQRGDPKQVELLILIAIAIWLVFEVLLIYILLKRLADDERLLKLAEENLQEMLEILEKAIEATQRGDPDLVRRLILQAKIIHEYFKLLLQH

SEQ ID NO: 1934 - protein, 236 aa, synthetic construct
  REGION 1..236: note = Synthetic
DELEEFYNLIRLILIRIRRLFRLAKERGDEEILESAKRMLEYAQRALQTVQEALENNDPELAELALFLALIVSILVLILELFLKAKERGDEEILESAKRMLEYAQRALQTVQEALENNDPELAELALFLALIVSILVLILELFLKAKERGDEEILESAKRMLEYAQRALQTVQEALENNDPELAELALQLARVVSLLVEILETFLKAKERGDEEQLRVAKELLHQAQRLLEFVQRL

SEQ ID NO: 1935 - protein, 236 aa, synthetic construct
  REGION 1..236: note = Synthetic
AELEEFFILILEILSLIRSLFELAKLLGDEEILESAKRMLEYAQRALQTVQEALENNDPELAELALFLALIVSILVLILLLFLKAKLRGDEEILESAKRMLEYAQRALQTVQEALENNDPELAELALFLALIVSILVLILELFLKAKERGDEEILESAKRMLEYAQRALQTVQEALENNDPELAELALELALIVYLLVLILHFYLLAKERGDEELRRDAEKLLETAQRSLQRVQEA

SEQ ID NO: 1936 - protein, 236 aa, synthetic construct
  REGION 1..236: note = Synthetic
NELEIFKLLIEIIRLKIRDLFEKAKERGDEEILESAKRMLEYAQRALQTVQEALENNDPELAELALFLALIVSILVLILELFLKAKERGDEEILESAKRMLEYAQRALQTVQEALENNDPELAELALFLALIVSILVLILELFLKAKERGDEEILESAKRMLEYAQRALQTVQEALENNDPSLARLALFLAQIVELLVQILEDFLEAKERGDEETQKQARRLLETAQRLLEDVQRS

SEQ ID NO: 1937 - protein, 236 aa, synthetic construct
  REGION 1..236: note = Synthetic
SELEEFKLLIREVLTLIRNLFELAERRGDEEILESAKRMLEYAQRALQTVQEALENNDPELAELALFLALIVSILVLILRLFLRAKQRGDEEILESAKRMLEYAQRALQTVQEALENNDPELAELALFLALIVSALVLILELFLKAKERGDEEILESAKRMLEYAQRALQTVQEALENNDPRLALQALLLAIVVIALVYLLEVYLLAKERGDEHSRRTAEELLRYAQHILQLVEEN

SEQ ID NO: 1938 - protein, 236 aa, synthetic construct
  REGION 1..236: note = Synthetic
AELALFLRLIEQIKLLILQLYNTAKIRGDEEILESAKRMLEYAQRALQTVQEALENNDPELAELALFLALIVSILVLILELFLKAKERGDEEILESAKRMLEYAQRALQTVQEALENNDPELAELALFLALIVSILVLILELFLKAKERGDEEILESAKRMLEYAQRALQTVQEALENNDPELAELALRLALIVEILVYILLLYLIAKERGDEEIRRYAERLLEHAQRNLQRVQEA

SEQ ID NO: 1939 - protein, 236 aa, synthetic construct
  REGION 1..236: note = Synthetic
DELEKFRLRIEEIRTLIELLFRLAELRGDEEILESAKRMLEYAQRALQTVQEALENNDPELAELALFLALIVSILVLILELFLKAKERGDEEILESAKRMLEYAQRALQTVQEALENNDPELAELALFLALIVSILVLILELFLKAKERGDEEILESAKRMLEYAQRALQTVQEALENNDPRLASKALLLALIVRLLVLILEFFLHAKEEGDEEARRNAKDLLETAQRVLENLERS

SEQ ID NO: 1940 - protein, 289 aa, synthetic construct
  REGION 1..289: note = Synthetic
NEEEERIRRLAVQAILTIAEIWKELKMAKTEEEFQHLLELLQQVLETYREARELSRKAKEAGDLELAVQAMEIVLLAVQAILTIAEIWKELKMAKTEEEFQHLLELLQQVLETYREARELSRKAKEAGDLELAVQAMEIVLLAVQAILTIAEIWKELKMAKTEEEFQHLLELLQQVLETYREARELSRKAKEAGDLELAVQAMEIVLLAVQAILTIAEIWKELKMAKTEEEFQYLLELLQRVLELYREAREISREAKEAGDLKLAVLAMRIVLLYVRTVLHRAEIFKRS

SEQ ID NO: 1941 - protein, 199 aa, synthetic construct
  REGION 1..199: note = Synthetic
KEEDILRAKTEITEFMRRLKRAGVPEEELIQQALRLAVLFAEEAGVDARELVKQVIIYIAQVLIEETMKELKRAGVPEEELIQQALRLAVLFAEEAGVDARELVKQVIIYIAQVLIEETMKELKRAGVPEEELIQQALRLAVLFAEEAGVDHRELVLLVILYIASILIYLTYEELLRAGVPEQELIEEAIRLFRLFLQS

SEQ ID NO: 1942 - protein, 222 aa, synthetic construct
  REGION 1..222: note = Synthetic
DKLEHLINRAEILIFEAEIIARELGDQEFMEVAREVMEFLLQALREGDMELVKLIYLIASALVLILKAIELAKQLGDQEFMEVAREVMEFLLQALREGDMELVKLIYLIASALLLILKAIQLAKQLGDQEFMEVAREVMEFLLQALREGDMELVKLIYLIASALLLILKAIQLAKQLGDQEFMEVAREVMEFLLQALREGDMELVRHIYFFAIQLLLHLRHL

SEQ ID NO: 1943 - protein, 239 aa, synthetic construct
  REGION 1..239: note = Synthetic
DEELNRSHTRIESLIEYVQRFATDEELARKVIQTAREYQERAEELQKLGNLEEILMLLQLALSFLLIILLIALVQKFATDEELARKVIQTAREYQERAEELQKLGNLEEILMLLQLALSFLLIILLIALVQKFATDEELARKVIQTAREYQERAEELQKLGNLEEILLLLLLALSFLLIILLIALVQKFATDEELAREVIQLAREYQERAEELQKLGNLERILFLLLIALSLLRIILKL

SEQ ID NO: 1944 - protein, 239 aa, synthetic construct
  REGION 1..239: note = Synthetic
DVELRQSELKIEALEHLVQQNATDEELARKVIQTAREYQERAEELQKLGNLEEILMLLQLALSFLLIILLIAQVQIFATDEELARKVIQTAREYQERAEELQKLGNLEEILMLLLLALSFLLIILLIAQVQRLATDEELARKVIQTAREYQERAEELQKLGNLEEILKLLLLALSFLLIILLIALVQRHATDEEDARKVIQIAREYQERAEELQKLGNLEEIAKLLLRALAYLLAILLL

SEQ ID NO: 1945 - protein, 239 aa, synthetic construct
  REGION 1..239: note = Synthetic
DFQLRQSHLTIELLIELVQRHATDEELARKVIQTAREYQERAEELQKLGNLEEILLLLLLALSFLLIILLIALVQKFATDEELARKVIQTAREYQERAEELQKLGNLSEILFLLLLALSFLLIILLIALVQKFATDEELARKVIQTAREYQERAEELQKLGNLEEILLLLLLALSFLLIILLIALVQKRATDEEQARKVIQHARENQERAEELQKLGNLIEILSILLQALILLELILLS

SEQ ID NO: 1946 - protein, 254 aa, synthetic construct
  REGION 1..254: note = Synthetic
SELHHRMQEIVELLAQILAWAKRFGVPEELLELLQKVLEEAWRLLEQARQAKDPEDLERVLLHLQMLLIVALLAQILAWAKRFGVPEELLELLQKVLEEAWRLLEQAKQAKDPEDLERVLLHLQMLLIVALLAQILAWAKRFGVPEELLELLQKVLEEAWRLLEQAKQAKDPEDLERVLLHLQMLLIVALLAQILAWAKRFGVPEELLELLQRVLELAWRLLEQAKQAKDPRDLKLVLELLEALLYLAELAQKR

SEQ ID NO: 1947 - protein, 268 aa, synthetic construct
  REGION 1..268: note = Synthetic
DELEQLILQIKSIATEMHRLAQELLKSSDEEVQRSAREFQERLKQIVEQAKQAYEAGDPEKVKLALLLVLILLIALEMFYIAVELLKSSDEEVQRSAREFQERLKQIVEQAKQAYEAGDPEKVKLALLLVLILLIALEMFYIAVELLKSSDEEVQRSAREFQERLKQIVEQAKQAYEAGDPEKVKLALLLVLILLIALEMFYIAVELLKSSDEEVQRSAREFQERLKQIVEQAKQAYEAGDPQLVREALALVLLLLVRLRIFVERVES

SEQ ID NO: 1948 - protein, 258 aa, synthetic construct
  REGION 1..258: note = Synthetic
DHLLLLILAEIAEEVERLLLYLERRSTDEESLQLAKELVEEVLELWKSARTSKDPEDMERALLLAILAQIAIEVLLLLWFLKRHSTDEESLQLAKELVEEVLELWKSARTSKDPEDMERALLLARLAQIAIEVLLLLWFLKRHSTDEESLQLAKELVEEVLELWKSARTSKDPEDMERAYLLALLAQIAIEVLLLLWELKINSTDEESLQIAKELVEEVLELWKSARTSKDPEDMRRALKRALEASYRIKVLLYFLRL

SEQ ID NO: 1949 - protein, 258 aa, synthetic construct
  REGION 1..258: note = Synthetic
RAEIEKDLEQIAAQVRLLLDHLKKHSTDEESLQLAKELVEEVEELLKSAEESKDPEDMERALLLAQLAQIAIEVLLLLWFLKRHSTDEESLQLAKELVEEVLELWKSARTSKDPEDMERALLLAQLAQIAIEVLLLLWFLKRHSTDEESLQLAKELVEEVLELWKSARTSKDPEDMERALLLAQLAQIAIEVLLLLWFLKRHSTDERSLQEAKELVEEVLELWKSARTSKDPEDMRRALLLAENAQHNIEFLIRLWLS

SEQ ID NO: 1950 - protein, 220 aa, synthetic construct
  REGION 1..220: note = Synthetic
SKEEQVRHAEHLADLLEILFERLRQLGDEELSEMVRELLRQILELIEQLLKAQQNGDEETFEEALRKIKKLLQVLEALSQAAELAELFERLRQLGDEELSEMVRELLRQILELIEQLLKAQQNGDEETFEHALLLIERLLLVLEALSQAAELAELFERLRQLGDEELSEMVRELLRQILELIEQLLKAQQNGDEETFFRALEEIARLLIRLYQLVQLARS

SEQ ID NO: 1951 - protein, 281 aa, synthetic construct
  REGION 1..281: note = Synthetic
SELEELFSTVIRLLVHLRRLAEELERLGNEELARKVKEMIRVVIELLERAEESLKQGSFEEAKKLLELAILIALVLILIIILVQLAQQLERLGNEELARKVKEMIRVVIELLERAIESLKQGSFEEAKKLLELAILIALVLILIIILVQLAQQLERLGNEELARKVKEMIRVVIELLERAIESLKQGSFEEAKKLLELAILIALVLILIIILVQLAQQLERLGNEELARKVKEMIRVVIELLERAIESLKQGSFEEAKRILEEAVLLARVLIQRIEVHQRN

SEQ ID NO: 1952 - protein, 281 aa, synthetic construct
  REGION 1..281: note = Synthetic
LELRILFEIVTRLLAELELLARILEELGNEELARKVKEMIRVVIELFERAEESRRQGSFEEAKKLLELAILIALVLILIIILVQLAQQLERLGNEELARKVKEMIRVVIELLERAIESLKQGSFEEAKKLLELAILIALVLILIIILVQLAQQLERLGNEELARKVKEMIRVVIELLERAIESLKQGSFEEAKKLLELAILIALVLILIIILVQLAQQLERLGNEELARKVKEMIRVVIELLERAIESLKQGSFEEAKRLLQRAILLARYLIELIEIHQEQ

SEQ ID NO: 1953 - protein, 222 aa, synthetic construct
  REGION 1..222: note = Synthetic
DELESLITRAEALIRFAEVLAKYLGDQEFMEVAREVLEFLLQALREGDMELVKLIYLIASALVLILEAIIVALELGDQEFMEVAREVMEFLLQALREGDMELVKLIYLIASALLLILKAIQLAKQLGDQEFMEVAREVMEFLLQALREGDMELVKLIYLIASALLLILKAIQLAKQLGDQEFMEVAREVMEFLLQALREGDRRLVFEIYSIAVHLLVQLLQS

SEQ ID NO: 1954 - protein, 281 aa, synthetic construct
  REGION 1..281: note = Synthetic
DELDELIVIVILLILKLERLAQQLERLGNEELARKVKEMIRVVIELLERAIESHKQGSFEEAKKLLELAILIALVLILIIILVQLAQQLERLGNEELARKVKEMIRVVIELLERAIESLKQGSFEEAKKLLELAILIALVLILIIILVQLAQQLERLGNEELARKVKEMIRVVIELLERAIESLKQGSFEEAKKLLELAILIALVLILIIILVQLAQQLERLGNEELARKVKERIRVVIELLERAIESLKQGSFEEAKRLLLEAIFLARILILDIILYQLS

SEQ ID NO: 1955 - protein, 281 aa, synthetic construct
  REGION 1..281: note = Synthetic
DELEILIALVRHLILILYALAYLLEELGNEELARKVKEMIRVVRELLERAIESLKQGSFEEAKKLLELAILIALVLILIIILVQLAQQLERLGNEELARKVKEMIRVVIELLERAIESLKQGSFEEAKKLLELAILIALVLILIIILVQLAQELERLGNEELARKVKEMIRVVIELLERAIESLKQGSFEEAKKLLELAILIALVLILIIILVRLAQQLERLGNEELARKVKEMIRVVIELLERAIESLKQGSFEEALRLLHEALLLANILIQRIEIEQHL

SEQ ID NO: 1956 - protein, 281 aa, synthetic construct
  REGION 1..281: note = Synthetic
DELEELLARVIYLIYLLELLAKELERLGNEELARKVKEMIRVVIELLERAEESRKQGSFEEAKKLLELAILIALVLILIIILVRLAQQLERLGNEELARKVKEMIRVVIELLERAIESLKQGSFEEAKKLLELAILIALVLILIIILVQLAQQLERLGNEELARKVKEMIRVVIELLERAIESLKQGSFEEAKKLLKLAILIALVLILIIILVQLAQQLERLGNEELAREVKEYIRRVIELLERAIESLKQGSFEEAQRLLLEALVLAEDLIRQIILVQLS

SEQ ID NO: 1957 - protein, 302 aa, synthetic construct
  REGION 1..302: note = Synthetic
SEEELFKLLLLIELILFIVERIFEQAKKAGMPEEILEDMEQLIEELRQLLEEAKRAVEEYKRTGDEKYFSLAELIWLLAQILLILAQVLFIFAQAKKAGMPEEILEDMEQLIEELRQLLEEAKRAVEEYKRTGDEKYFSLAELIWLLAQILLILAQVLFIFAQAKKAGMPEEILEDMEQLIEELRQLLEEAKRAVEEYKRTGDEKYFFLAELIWLLAQILLILAQVLFIFAQAKKAGMPEEFLERMEQLIEELRQLLEEAKRAVEEYKRTGDHQYFNEAYRITLQAFVNLRIAQLLFIQAQS

SEQ ID NO: 1958 - protein, 279 aa, synthetic construct
  REGION 1..279: note = Synthetic
SREILRLYYLVQELLEELFETLKQLKEEGDEEIFENVRTALESATQIMKEAYRSYQAGDYEEAERLLRIASLLAEVVQLLRELFETLKQLKEEGDEEIFENVRTALESATQIMKEAYRSFQAGDYEEAERLLRIASLLAEVVQLLRELFETLKQLKEEGDEEIFENVRTALESATQIMKEAYRSFQAGDYEEAERLLRIASLLAEVVQLLRELFETLKQLKEEGDEEIFEFVRFALEFATKIMKEAYRSFQAGDYERAERLLEVASLIARTVHRIRRLL

SEQ ID NO: 1959 - protein, 279 aa, synthetic construct
  REGION 1..279: note = Synthetic
SERIYRLYYEVLFLLQLLFETLKQLKEEGDEEIFENVRTALESATQIMKEAHRSFQAGDYEEAERLLRIASLLAEVVELLRELFETLKQLKEEGDEEIFENVRTALESATQIMKEAYRSFQAGDYEEAERLLRIASLLAEVVQLLRELFETLKQLKEEGDEEIFENVRTALESATQIMKEAYRSFQAGDYEEAEKLLEIASLLAEVVQLLRELFETLKQLKEEGDERIFELVREALEIATQIMKEAYRSFQAGDLHEALVRLQLASVFAKVVKRAREQL

SEQ ID NO: 1960 - protein, 279 aa, synthetic construct
  REGION 1..279: note = Synthetic
LERIEELHLRVYALLYFLFETLKQLKEEGDEEIFENVRTALESATQILKEAHRSFQAGDYEEAERLLRIASLLAEVVRLLRFLFETLKQLKEEGDEEIFENVRTALESATQIMKEAYRSFQAGDYEEAEKLLRIASLLAEVVRLLRELFETLKQLKEEGDEEIFENVRTALESATQIMKEAYRSFQAGDLREAIILLQIASLLAEVVQLLRELFETLKQLKEEGDEHIFELVRRALEIATQIMKEAYRSFQAGDNEEARLLLLRASTDARFVQELRRQH

SEQ ID NO: 1961 - protein, 199 aa, synthetic construct
  REGION 1..199: note = Synthetic
EDLRERLRELIETLARAAELLYSAIESAGGTEELQEIARRALELVKEALEELKQAKTREELHRVLLLMIIAYLALQAVLAFYQILLAGGTEELQEIARRALELVKEALEELKQAKTEEELYRVLLLMLIAHLALLAVLLFYLILLLGGTEELQEIARRALELVKEALEELKQAKTEEELRHVIRLMIEALSLLLHVLAL

SEQ ID NO: 1962 - protein, 274 aa, synthetic construct
  REGION 1..274: note = Synthetic
LEEILLEIRLIILRIERLMLELKRQAGTDEEAKEEAQRIKELLEQLFELFEKVRESGDLEDAKLLLILAQIVLIIVRIVLLMLELKRQAGTDEEAKEEAQRIKELLEQLFELFEKVRESGDLEDAKLLLILAQIVLIIVRIVLLMLELKRQAGTDEEAKEEAQRIKELLEQLFELFEKVRESGDLEDAKLLLILAQIVLIIVRIVLLMLELKRQAGTDEEAKEEAQRIKELLEQLFELFEKVRESGDLRDAEHLLQLAQLVLHLVQLVLERLES

SEQ ID NO: 1963 - protein, 274 aa, synthetic construct
  REGION 1..274: note = Synthetic
LREVLLRIEIIILEIELLLLELKRQAGTDEEAKEEAQRIKELLEQLFELFEKVRESGDLEDAKLLLILAQIVLIIVRIVLLMLELKRQAGTDEEAKEEAQRIKELLEQLFELFEKVRESGDLEDAKLLLILAQIVLIIVRIVLLMLELKRQAGTDEEAKEEAQRIKELLEQLFELFEKVRESGDLEDAKLLLILAQIVLIIVRIVLLMLELKRQAGTDEEAKEEAQRIKELLEQLFELFEKVRESGDLEDAKRLLRLAEYVLQQVELVLLRLES

SEQ ID NO: 1964 - protein, 255 aa, synthetic construct
  REGION 1..255: note = Synthetic
MEEIHQIALQVEVFADRARQIVKEAGLPPSYKELLRLIIELIKQALELAQQGNWEEAILMARIALLAAKVIWFAVLAWSIVKEAGLPPSYKELLRLIIELIKQALELAQQGNWEEAILMARIALLAAKVIWFAVLAWSIVKEAGLPPSYKELLRLIIELIKQALELAQQGNWEEAILMARIALLAAKVIWFAVLAWSIVKEAGLPPSYKELLRLIIELIKQALELAQQGNWHEARILAFEALALAELIFQLVRHH

SEQ ID NO: 1965 - protein, 273 aa, synthetic construct
  REGION 1..273: note = Synthetic
DRELKRLLIEAQSLAYEARLLAELSEDENVRRLAQQMYELVQEAKELFEKYRKAGMSPEEVYLSLLLLLLLIKAFLLAIEALILARQSEDENVRRLAQQMYELVQEAKELFEKYRKAGMSPREVYLSLLLLLLLIKAFLLAIEALILARRSEDENVRRLAQQMYELVQEAKELFEKYRKAGMSPLEVYLSLLLLLLLIKAFLLAIEALILARRSEDENVRRLAQQMYELVQEAKELFEKYRKAGMSPREVYRLLLELLSEIHLNLLIIEELIH

SEQ ID NO: 1966 - protein, 247 aa, synthetic construct
  REGION 1..247: note = Synthetic
SDEELEFLETALQAFLLARLAGDEEALETVKQLLRKLEEAIEKYEKTGDPRVLELLREMLELALFLITALLALLLAQKAGDEEALETVKQLLRKLLEAIEKYEKTGDPRVLELLREMLELALFLITALLALLLAQKAGDEEALETVKQLLRKLLEAIEKYEKTGDPRVLELLREMYELALFLITALLALLLAQQAGDEEALETVKQLLRKLLEAIEKYEKTGDPRVLELLERMVEKALFIIFRLEYL

SEQ ID NO: 1967 - protein, 218 aa, synthetic construct
  REGION 1..218: note = Synthetic
SRENRFLITALEALALADEAGNEELIEEIERLLEKISKALREGDEETVKQAWRNVVFMITAALALLLAQEAGNEELIEEIERLLEKISKALREGDEETVKQAWRNVVFMITAALALLLAQEAGNEELIEEIERLLEKISKALREGDEETVKQAWENVRFMINAALALLLAQEAGNEELIEEIERLLEKISKALREGDEETVRRANAEVLQLIEEALRL

SEQ ID NO: 1968 - protein, 246 aa, synthetic construct
  REGION 1..246: note = Synthetic
DEEVEHLLVALRALLLVRQAGNEEVQEQIEKLLEKLEKALQLLQQTGDPRALETAQRALENVRYLLMALKALTLVREAGNEEVQEQIEKLLEKLLKALQLLEQTGDPRALETAQRALENVKYLLQALLALKLVREAGNEEVQEQIEKLLEKLLKALQLLEQTGDPRALETAQRALENVLYLLTALQALKLVREAGNEEVQEQIEKLLEKLLKALQLLEQTGDPRALETAERALQKVIELLHRLLKL

SEQ ID NO: 1969 - protein, 246 aa, synthetic construct
  REGION 1..246: note = Synthetic
DRDVEYLVVAYRALLLVRDAGNEEVQEQIEKLLEKLEKALQLLRQTGDPRALETAQRALENVRYLLLALKALLLVREAGNEEVQEQIEKLLEKLLKALQLLEQTGDPRALETAQRAARNVNFLLTALRALLLVREAGNEEVQEQIEKLLEKLLKALQLLEQTGDPRALETAERALRNVQFLLVALLALKLVRRAGNEEVQEQIEKLLEKLLKALQLLEQTGDPRAEETAERALNIVFKLFLELLVS

SEQ ID NO: 1970 - protein, 226 aa, synthetic construct
  REGION 1..226: note = Synthetic
AKMEWWAELALKLAKELEDLVKKMGDEESIEIIKQVFRLLLQILEEFRRDPNAYESIKTAKMLWWALLALKLAIELLQLVKEMGDEESIEIIKQVFRLLLQILEEFRRDPNAYESIKTAKMLWWALLALKLAIELLQLVKEMGDEESIEIIKQVFRLLLQILEEFRRDPNAYESIKTAKELWYALRLLKNAIELLKLVKRYGDEELERIIERLFRNALEILERLRR

SEQ ID NO: 1971 - protein, 226 aa, synthetic construct
  REGION 1..226: note = Synthetic
DELEIIALEALSLARELLQLVKEMGDEESIEIIKQVFRLLRQILEEFERDPNAYESIKTAKMLWWALLALKLAIELLQLVKEMGDEESIEIIKQVFRLLLQILEEFRRDPNAYESIKTAKMLWWALLALKLAIELLQLVKEMGDEESIEIIKQVFRLLLQILEEFRRDPNAEKSIRLAKLLFYALLLLKLAIETLQQVKEEGDEHRIRSVERAFKNALRFLKTLVD

SEQ ID NO: 1972 - protein, 249 aa, synthetic construct
  REGION 1..249: note = Synthetic
SEEEELLRAYEDVVTLRLLAEELGDEETKEWVEQMFQELREIEQLIRETGDPRARRRLQELLELLKAFKFVIRLTQQARELGDEETKEWVEQMFQELREITQLIKETGDPRARRRLQELLELLKAFKFVIELTKQARELGDEETKEWVEQMFQELREITQLIKETGDPRARRRLQELLLLLHAFKLVIELTKQARELGDEETKEWVEQMFQELREITQLIKETGDPRARERLRQLIAELHRFRVEIELS

SEQ ID NO: 1973 - protein, 247 aa, synthetic construct
  REGION 1..247: note = Synthetic
DLEETHHLYTANRALKLAREAGDEEVIETIEEMLRRIIEALQITQKTNDPEARKRVEELWRQVLFLLTALQALKYAQEAGDEEVIETIKEMIRRIIEALQITQKTNDPEARKRVEELWRQVLFLLTALQALKYAQEAGDEEVIETIKEMIRRIIEALQITQKTNDPEARKRVEELYRQVHALLTALQALKYAQEAGDEEVIETIKEMIRRIIEALQITQKTNDPEARKRVRELLREVLLLLRELQRL

SEQ ID NO: 1974 - protein, 247 aa, synthetic construct
  REGION 1..247: note = Synthetic
SEEQRHFLFTAFQALVLALIAGDEEVIETIKEMIRRIIEALQITQKTNDPEARKRVEELWRQVLFLLTALQALIYALLAGDEEVIETIKEMIRRIIEALQITQKTNDPEARKRVEELWRQVHFLLTALQALYYALEAGDEEVIETIKEMIRRIIEALQITQKTNDPEARKRVRELFEQVLYLLYALQALKYAQEAGDEEVIETIKEMIRRIIEALQITQKTNDPEARKRVKELFKLVLELLVRLQSS

SEQ ID NO: 1975 - protein, 255 aa, synthetic construct
  REGION 1..255: note = Synthetic
MDEIRKIAIKVKSLAELAKLTVKRAGLPPSYKELLRLIIELIKQALELAQQGNWEEAILMARIALLAAKVIYFAVEAWSIVKEAGLPPSYKELLRLIIELIKQALELAQQGNWEEAILMARIALLAAKVIWFAVLAWSIVKEAGLPPSYKELLRLIIELIKQALELAQQGNWKEAILMARIALIAAKVIWFAVLAWSIVKEAGLPPSYKELLRLIIELIKQALELAQQGNHEEALQLAARALVLAKQIWEAVLEW

SEQ ID NO: 1976 - protein, 197 aa, synthetic construct
  REGION 1..197: note = Synthetic
DEFELLVLEIRSLVLRALRTIKKLGDEELFKLLQEAAREIYEAAKRGDEERLEFMLQVVRILLLVAQALETIKKLGDEELFKLLQEAAREIYEAAKRGDEERLEFMLQVVRILLLVAQALETIKKLGDEELFKLLQEAAREIYEAAKRGDEIRLNLMLLVVYFLLLVARTLEIILKYGDEEQFRRLQELARLVFEHS

SEQ ID NO: 1977 - protein, 262 aa, synthetic construct
  REGION 1..262: note = Synthetic
DELEYRLQKSVRRILELLEKALKKFQETGDPKWREIYEIARQILEKVLEAIRSGDPEEMQIALLLAQLIISVFRILELLEKALKKFQETGDPKWREIYEIARQILEKVLEAIRSGDPEEMQIALLLAQLIISVFRILELLEKALKKFQETGDPKWREIYEIARQILEKVLEAIRSGDPEEMQIALLLAQLIISVFRILELLEKALKKFQETGDPFWRVIYEIARLILELVLEAIRSGDPREMRIALFFAENIIDLFENLEKS

SEQ ID NO: 1978 - protein, 235 aa, synthetic construct
  REGION 1..235: note = Synthetic
SEEERFLETAFLLQKNALRLRRLYEQYGDEQAQRLLESLEELFEKLQKAFRSGDPEELREVLELARYLLTAFKLLQNMKKLRELYEQYGDEQAQRLLESLKELFEKLLKAYASGDPEELREVLELARYLLTAFKLLQNMKKLRELYEQYGDEQAQRLLESLKELFEKLLKAYASGDPEELREVLELARYLLEAFKNLQNMKKLRELYEQYGDERAQQQLELLKRLFEQLLKKYAS

SEQ ID NO: 1979 - protein, 235 aa, synthetic construct
  REGION 1..235: note = Synthetic
LEEERYLETAILLHRNQIILEYLYEKYGDEQAQRLLESLKELYEKLRKALHSGDPEELREVLELARYLLTAFKLLQNMKKLRELYEQYGDEQAQRLLESLKELFEKLLKAYASGDPEELREVLELARYLLTAFKLLQNMKKLRELYEQYGDEQAQRLLESLKELFEKLLKAYASGDPEELREVLELARLLLRAFKSLQEMKKLRELYEQHGDHNAEILLELLRNFFEQLLKHYAS

SEQ ID NO: 1980 - protein, 264 aa, synthetic construct
  REGION 1..264: note = Synthetic
AQLFEELAELLEQLEKFMKRLEALAHFFGDEEVLKVLRALQKAIEYAIKALRAGDPEKIRQAQLFLELAFLLAQLAEFMFELLQQYEKYGDEEVLKVLRALQKAIEYAIKALRAGDPEKIRQAQLFLELAFLLAQLAQFMWELLRIYEQYGDEEVLKVLRALQKAIEYAIKALRAGDPEKIRQAQLFLELAFLLAQLAQFMWELLEIYERYGDEEVLKVLRALQKAIEYAIKALRAGDPEKIRQAQQFLLEAYVLALHAQRIWS

SEQ ID NO: 1981 - protein, 263 aa, synthetic construct
  REGION 1..263: note = Synthetic
DEELQRLLFEAELLIQQIIELIRNASEETMEKALQFVEFVTQLLRQATELWKQGNFEEAKRLVELASLIARAIILILLIIILIRNASEETMEKALQFVEFVTQLLRQATELWKQGNFEEAKRLVELASLIARAIILILLIIILIRNASEETMEKALQFVEFVTQLLRQATELWKQGNFEEAKRLVELASLIARAIILILLIIILIRNASERVMERALQLVEEVTQLLRQATELWKQGNFEEAKRLVRQASLFAELIIRLLEES

SEQ ID NO: 1982 - protein, 263 aa, synthetic construct
  REGION 1..263: note = Synthetic
DEELEQLISEAEVLIRQIKLLIRNASEETMEKALQFVEFVTQLLRQATELWKQGNFEEAKRLVELASLIARAIILILLIIILIRNASEETMEKALQFVEFVTQLLRQATELWKQGNFEEAKRLVELASLIARAIILILLIIILIRNASEETMEKALQFVEFVTQLLRQATELWKQGNFEEAKKLVELASLIARAIILILLIIILIRNASEQAMEYALRLVEEVTQLLRQATELWKQGNFEEALQLVILASYIALAIIHILRRH

SEQ ID NO: 1983 - protein, 263 aa, synthetic construct
  REGION 1..263: note = Synthetic
DEELEELILEALILILAIILLIRRASEETMEKALQFVEFVTQLLRQATELWKQGNFEEAKRLVELASLIARAIILILRIIILIRNASEETMEKALQFVEFVTQLLRQATELWKQGNFEEAKRLVELASLIARAIILILLIIILIRNASEETMEKALQFVEFVTQLLRQATELWKQGNFEEAKRLVRLASYIARAIILILLIIILIRNASEEDMEEALQLVEFVTQLLRQATELWKQGNFEEALRLVIKASLLALYIILYLRNS

SEQ ID NO: 1984 - protein, 262 aa, synthetic construct
  REGION 1..262: note = Synthetic
DEREQELLEIAVRLRTLVRRAKEYYEKTGDEEWQKILELIQEVIERMFRAVQEGDPELQEKVKRLAELAHIAFRLLQLVEQAKEYYEKTGDEEWQKILELIQEVIERMFRAIQEGDPELQEKVKRLAELAHIAFRLLQLVEQAKEYYEKTGDEEWQKILELIQEVIERMFRAIQEGDPELQEKVKRLAELAHIAFRLLQLVEQAKEYYEKTGDEHWQEILEEIQEVIERMFRAIQEGDPRLQELVKIRAEAAYRLFRTLQKL

SEQ ID NO: 1985 - protein, 262 aa, synthetic construct
  REGION 1..262: note = Synthetic
SELELEILHLLQRARELALQLRQIFEQYGDETVLKILEIILEVIEEAIKAVQNGDPEQIRKASLFLEIAILLAEAVKLALQLRQIFEQYGDETVLKILEIILEVIEEAIKAVQNGDPEQIRKASLFLEIAILLAEAVKLALQLRQIFEQYGDETVLKILEIILEVIEEAIKAVQNGDPEQIRKASLFLEIAILLAEAVKLALQLRQIFEQYGDETVLRILEIILEVIERAIKAVQNGDPQLIRIASHLLRSAVELAEEVKLQ

SEQ ID NO: 1986 - protein, 242 aa, synthetic construct
  REGION 1..242: note = Synthetic
SEELELIMEQIELLLRQAETIAGSDSEIIEAVRKVIELILEATRLFQAGDDEEARKLFQLALIMAKIVYLLAQAIKIAGSDSEIIEAVRKVIELILEATRLFQAGDDEEARKLFQLALIMAKIVYLLAQAIKIAGSDSEIIEAVRKVIELILEATRLFQAGDDEEARKLFRLALLMARIVYLLAQAIKIAGSDSEIIEAVRKVIELILEATRLFQAGDDEEARQLFFEALRLAYEVFIRAEQ

SEQ ID NO: 1987 - protein, 284 aa, synthetic construct
  REGION 1..284: note = Synthetic
DQEHHLRRVFEEAKQLVERIVEIAERIKRELGDERAQEVSEDAKQMLEEIKEAIERFKRTGDEKAKQLIELALVLLLAILLVLEIVEIAERIKRELGDERAQEVSEDAKQMLEEIKEAIERFKRTGDEKAKQLIELALVLLLAILLVLEIVEIAERIKRELGDERAQEVSEDAKQMLEEIKEAIERFKRTGDEKAKKLIELALVLLLAILLVLEIVEIAERIKRELGDHFAQRVSEIAKQLLEEIKEAIERFKRTGDLEAYLRIFTALHYLRYILELLEEIEIR

SEQ ID NO: 1988 - protein, 284 aa, synthetic construct
  REGION 1..284: note = Synthetic
DQEIELLRVFLEAKQLVERIVRIAERIKRELGDERAQEVSEDAKQMLEEIKEAIERFKRTGDEKAKQLIELALVLLLAILLVLEIVEIAERIKRELGDERAQEVSEDAKQMLEEIKEAIERFKRTGDEKAKQLIELALVLLLAILLVLEIVEIAERIKRELGDERAQEVSEDAKQMLEEIKEAIERFKRTGDEKAKHLIELALVLLLAILLVLEIVEIAERIKRELGDHFAQEVSEKAKQMLEEIKEAIERFKRTGDHRAILIIYEALHVLEIILRLLEIIEKS

SEQ ID NO: 1989 - protein, 284 aa, synthetic construct
  REGION 1..284: note = Synthetic
NEELRLREVLQLAFELVILIEHLAEQIKRELGDERAQEVSEDAKQMLEEIKEAIERFKRTGDEKAKQLIELALVLLLAILLVLRIVLLAELIKRELGDERAQEVSEDAKQMLEEIKEAIERFKRTGDEKAKKLIELALILLLAILLVLRIVLLAELIKRELGDERAQEVSEDAKQMLEEIKEAIERFKRTGDRKAVLLILLAYYLLLAILLVLEIVLIAERIKRELGDEQAQEVSEDAKQMLEEIKEAIERFKRTGDEKALRLILRAHLHLEYILRLLRLIETS

SEQ ID NO: 1990 - protein, 217 aa, synthetic construct
  REGION 1..217: note = Synthetic
DEEEHELRHLEAQVTQLLIHVEFLFRKHGDESARFASELLREAMELIQQVRRLKEAGNEEKARETLQRAKELIELAKLITEVLELLKQVKELFEQYGDESARFASELLREAMELIQQVRRLKEAGNEEKARETLQRAKELIELAKLITEVLELLKQVKELFEQYGDESARFASELLREAMELIQQVRRLKEAGNEEKARETLRRARKLIFEARLVTE

SEQ ID NO: 1991 - protein, 195 aa, synthetic construct
  REGION 1..195: note = Synthetic
DERERFELFANIARIFIKEALELVQKQGDEEAIEVIQTILELMLELLRRIKETGNPELLKSLFYLAFAAIALLFILRALELVQKQGDEEAIEVIQTILELMLELLRRIKETGNPELLKSLFFLAFAAQALLYILRALELVQKQGDEEAIEVIQTILELMLELLRRIKETGNPQLLRELEYLAFHALLLNTRLRVS

SEQ ID NO: 1992 - protein, 257 aa, synthetic construct
  REGION 1..257: note = Synthetic
DEELIETFLLITEVFLRAEFLLEHAKRAGDEESQRKIEELIRQAKELLERVKNATTKEQLEQILTTAQILLVMLQAIHLLLIAKEAGDEESQRKIEELIRQAKELLERVKNATTKEQLEQILTTAQILLVMLQAIELLLKAKEAGDEESQRKIEELIRQAKELLERVKNATTREQLHQILTTALILLVMLQAIELLLKAKEAGDEESQRRIEELIRQAKELLERVKNATTFEQLAEILVIAYRLLIRLEFIERRLEL

SEQ ID NO: 1993 - protein, 289 aa, synthetic construct
  REGION 1..289: note = Synthetic
DEERFQISTFILRVIRKAIEVVLRALELYRKAGDPKALENAQRAEEIMQKLKELFEELERATTPEQFQRLYVSAFILYVILKAIEVVLRALELYRKAGDPKALENAQRAEEIMQKLKELFEELERATTPEQFQRLYVSAFILYVILKAIEVVLRALELYRKAGDPKALENAQRAEEIMQKLKELFEELERATTPEQFQRLYVSAFILYVILKAIEVVLRALELYRKAGDPKALENAQRAEEIMQKLKELFEELERATTPRQFEELFLRAYLLFNILEFIEEQLRLLEKS

SEQ ID NO: 1994 - protein, 289 aa, synthetic construct
  REGION 1..289: note = Synthetic
DEQELRVSKFILQVILFAYEVVERARILYKQAGDPKALENAQRAEEIMQKLKELFEELKRATTPEQFQRLYVSAFILYVILKAIEVVLRALELYRKAGDPKALENAQRAEEIMQKLKELFEELERATTPEQFQRLYVSAFILYVILKAIEVVLRALELYRKAGDPKALENAQRAEEIMQKLKELFEELERATTPEQFHRLYVSAFILYVILKAIEVVLRALELYRKAGDPRALENAQRAEEIMQKLKELFEELERATTPEQFKHLYENAVRLYVYLLLIEKLLETIERL

SEQ ID NO: 1995 - protein, 256 aa, synthetic construct
  REGION 1..256: note = Synthetic
LEFEELLEQATHILANLYEILLLLRLLGDEEAYEKAKQVLEEAERLLRQAEESGDPEDLEFYVLLIQALLILAQLMLILLRLKLLGDEEAYEKAKQVLEEAERLLRQAKESGDPEDLEFYVLLIQALLILAQLMLILLRLKLLGDEEAYEKAKQVLEEAERLLRQAKESGDPEDLRFYVLLIQALLILAQLMLILLRLKLLGDEEAYEKAKQLLEEAERLLRQAKESGDPRDLEEYVSLIRLLLYEAELLLELLRS

SEQ ID NO: 1996 - protein, 256 aa, synthetic construct
  REGION 1..256: note = Synthetic
DEFEELEEQALHIVALLSSILAYLKLLGDEEAYEKAKQVLEEAKRLLRQAEESGDPEDLEFYVLLIQALLILAQLMRILLLLKRLGDEEAYEKAKQVLEEAERLLRQAKESGDPEDLEFYVLLIQALLILAQLMLILLRLKLLGDEEAYEKAKQVLEEAERLLRQAKESGDPEDLRFYVLLIQALLILAQLMLILLRLKRLGDEEAYEKAKQVLEEAERLLRQAKESGDPRDLKRHVTLIIILLQIAENLLYLLKL

SEQ ID NO: 1997 - protein, 242 aa, synthetic construct
  REGION 1..242: note = Synthetic
LEELELIEVEIRLLLELAKHIAGSDSEIIEAVRKVIELILEATRLFQAGDDEEARKLFQLALIMAKIVLLLARAIHIAGSDSEIIEAVRKVIELILEATRLFQAGDDEEARKLFQLALIMAKIVYLLAQAIKIAGSDSEIIEAVRKVIELILEATRLFQAGDDEEAHRLFLLALVMAEIVYLLAQAIKIAGSDSEIIEAVRKVIELILEATRLFQAGDREEAEELFIRAHELASRVYLRALQ

SEQ ID NO: 1998 - protein, 203 aa, synthetic construct
  REGION 1..203: note = Synthetic
SEYQFEIEYLVHNAHALALHLGDEEALRTVEQIMENLKSDDEETLRKIYLQALIIILVLLAMLLARLLGDEEALRTVEQIMENLKSDDEETLRKIYLQALIIILVLRAMFLARTLGDEEALRTVEQIMENLKSDDEETLIRIYLQALIIILVLLAMRLAQELGDEEALRTVEQIMENLKSDDEETLIKILVLAYEIILRLETS

SEQ ID NO: 1999 - protein, 288 aa, synthetic construct
  REGION 1..288: note = Synthetic
NERDELIEIAIRIILLAQRILEWVSEFYKRTGDERAREAYQKVKEIVEKIRESFEQLVRADTKEEIEQAVLTAQAALIIAQAILILLWVSEFYKRTGDERAREAYQKVKEIMEKIKESFEQLERADTKEEIEQAVLTAQAALIIAQAILILLWVSEFYKRTGDERAREAYQKVKEIMEKIKESFEQLERADTKEEIEQAVLTAQAALIIAQAILILLWVSEFYKRTGDENAREAYETVKRIMELIKEAFERLERADTKEDIERAVELAHTALLLAELFLHFLELEERH

SEQ ID NO: 2000 - protein, 288 aa, synthetic construct
  REGION 1..288: note = Synthetic
SEELELIRIAYEIILEAIIILLYVEEFYKRTGDERAREAYQKVKEIMEKIKESFEQLRRADTKEEIEQAVLTAQAALIIAQAILILLWVSEFYKRTGDERAREAYQKVKEIMEKIKESFEQLERADTKEEIEQAVLTAQAALIIAQAILILLWVSEFYKRTGDERAREAYQKVKEIMEKIKESFEQLERADTKEEIEQAVLTAQAALIIAQAILILLWVSEFYKRTGDEKAREAYQRVKEIMERIKESFEQLERADTKHDIYEAVTDARAALLEALYILRTLWFNEFS

SEQ ID NO: 2001 - protein, 256 aa, synthetic construct
  REGION 1..256: note = Synthetic
DDLEELLEHALELLYQIQVIILILQEAGDEESVEKAKELFEKALESLERARRSGDPEDIQLMVLLVQAFLLLALILLIILHLQRAGDEESVEKAKELFEKALESLERAKRSGDPEDIRLMVLLVQAFLLLAQILLIILKLQKAGDEESVEKAKELFEKALESLERAKRSGDPRDILLMVSLVQAFLLLAQILLIILRLQLAGDEESVEKAKELFEKALESLERAKRSGDPEDIFKMVILVIYFLLLAETLLQLLES

SEQ ID NO: 2002 - protein, 256 aa, synthetic construct
  REGION 1..256: note = Synthetic
DQLERLLQLAYKLLFLIQFIIFQLQQAGDEESVEKAKELFEKALESLERARRSGDPEDIQLMVLLVQAFLLLAQILLIILKLQRAGDEESVEKAKELFEKALESLERAKRSGDPEDIQLMVLLVQAFLLLAQILLIILKLQLAGDEESVEKAKELFEKALESLERAKRSGDPEDIELMVLLVQAFLLLAQILLIILKLQLAGDEESVEKAKELFEKALESLERAKRSGDPRDIKEMVLEVLEFLLLAEILLLHLES

SEQ ID NO: 2003 - protein, 256 aa, synthetic construct
  REGION 1..256: note = Synthetic
SFEEYFLNQAQKILANILAIIYLLEQAGDEESVEKAKELFEKARESLERAKRSGDPEDILLMVLLVQAFLLLARILLIILYLQQAGDEESVEKAKELFEKALESLERAKRSGDPKDIFLMVLLVLAFLLLAQILEIILLLELAGDEESVEKAKELFEKALESLERAKRSGDPRDILLMVLLVYAFLLLAQILLIILLLLEAGDEESVEQAKELFEKALESLERAKRSGDPHDIREMVAQVLHFLYLAEILLLESLL

SEQ ID NO: 2004 - protein, 256 aa, synthetic construct
  REGION 1..256: note = Synthetic
SYLEYLLVEARQILFRIEAIIEFLQRAGDEESVEKAKELFEKALESLERAKRSGDPRDIYLMVLLVQAFLLLAQILAIILLLEKAGDEESVEKAKELFEKALESLERAKRSGDPHDIYLMVLLVQAFLLLALILLIILYLILAGDEESVEKAKELFEKALESLERAKRSGDPRDIFLMVLLVLAFLLLAQILLIILLLQQAGDEESVEKAKELFEKALESLERAKRSGDPHDIIHNVVLVQAYLLQAELLLFELLS

SEQ ID NO: 2005 - protein, 254 aa, synthetic construct
  REGION 1..254: note = Synthetic
SDEFLSKILELILKVELILRLAEQAGDEEIYRELKELLRKMKEDFQQAKEANSPESVKLALTLAQIVLLFAQVALILIRAEQAGDEEIYRELKELLRKMKEDFQQAKEANSPESVKLALTLAQIVLLFAQVALILIRAEQAGDEEIYRELKELLRKMKEDFQQAKEANSPESVKLALTLAQIVLLFAQVALILIRAEQAGDEEIYRELKELLRKMKEDFQQAKEANSPESVQEARLRAEQVLLFAEQALERIEH

SEQ ID NO: 2006 - protein, 254 aa, synthetic construct
  REGION 1..254: note = Synthetic
SQETLLRIRYLFQAVELILERAEQAGDEEIYRELKELLRKMKEDFQQAKEANSPESVKLALTLAQIVLLFAQVALILIRAEQAGDEEIYRELKELLRKMKEDFQQAKEANSPESVRLALTLAQIVLLFAQVALILIRAEQAGDEEIYRELKELLRKMKEDFQQAKEANSPESVHLALVLAQIVLLFAQVALILIRAEQAGDEEIYRKLKELLRKMKEDFQQAKEANSPESVLQALLRAEYVLRFAQLALEEIRS

SEQ ID NO: 2007 - protein, 254 aa, synthetic construct
  REGION 1..254: note = Synthetic
LDETLLEIEILFLRVELILRFAEKAGDEEIYRELKELLRKMKEDFQQAKEANSPESVKLALTLAQIVLLFAQVALILIRAEQAGDEEIYRELKELLRKMKEDFQQAKEANSPESVKLALTLAQIVLLFAQVALILIRAEQAGDEEIYRELKELLRKMKEDFQQAKEANSPHSVRLALTLALIVLLFAQVALILIRAEQAGDEEIYRRLKELLRKMKEDFQQAKEANSPRSVREALASAFRVLVYAEIALEHIKS

SEQ ID NO: 2008 - protein, 254 aa, synthetic construct
  REGION 1..254: note = Synthetic
LRETLQRILKLIVLVHLILLFAEEAGDEEIYRELKELLRKMKEDFQQAHEANSPESVKLALTLAQIVLLFAQVAEILIRAEEAGDEEIYRELKELLRKMKEDFQQAKEANSPESVKLALTLAQIVLLFAQVALILIRAEQAGDEEIYRELKELLRKMKEDFQQAKEANSPESVKLALTLAQIVLLFAQVALILIRAEQAGDEEIYRELKELLRKMKEDFQQAKEANSPESVEEAYLRATEVLNFARVALQRIRS

SEQ ID NO: 2009 - protein, 226 aa, synthetic construct
  REGION 1..226: note = Synthetic
DDLEHLELEILYFADLVRRIVEEYGLPESLQEIVRLILELVRKASQTGDEESMRLALLAAKIAYYAALVLSIVKEYGLPESLQEIVRLILELVRKASQTGDEESMRLALLAAKIAYYAALVLSIVKEYGLPESLQEIVRLILELVRKASQTGDEESMRLALLAAKIAYFAALVLSIVKEYGLPESLQEIVRLILELVRKASQTGDEESMRQALLQAILAFILARHL

SEQ ID NO: 2010 - protein, 262 aa, synthetic construct
  REGION 1..262: note = Synthetic
DQEVRHNLSELELLAELALELAAQLIQNGEMSEEQFEEIKKISEELTQLAREAMKTGDKETIEVALSVVRLVYLALLALKLAAQLIQNGEMSEEQFEEIKKISEELTQLAREAMKTGDKETIKVALSVVRLVYLALLALKLAAQLIQNGEMSEEQFEEIKKISEELTQLAREAMKTGDFETIQVALSVVRLVYLALLALKLAAQLIQNGEMSEEQFEEIKKISEELTQLAREAMKTGDYKKIVEALAIVRSLFEFLRFLKES

SEQ ID NO: 2011 - protein, 267 aa, synthetic construct
  REGION 1..267: note = Synthetic
DLKIEELHKRVNRAILLLRYAITLLENLASSSDEEVSETAKQLAENLRKLIEELLRMIEKIRNSTDPEDLKIAELIVRVALAIALLAIAIALLLELAESSDEEVSETAKQLAENLRKLIEELLRMIEKIKNSTDPEDLKIAELIVRVALAIALLAEAIALLLQLASSSDEEVSETAKQLAENLRKLIEELLRMIEKIKNSTDPEDLEIARFIVEVAFVIALLAFIIALLLESAHSSDEIIRRFAKRLAKEFLKLIELLLRSIEKYKN

SEQ ID NO: 2012 - protein, 267 aa, synthetic construct
  REGION 1..267: note = Synthetic
DEKIIKLIELVVRAILLLLLAITYLRNLERSSDEEVSETAKQLAENLRKLIEELLRMIEKIKNSTDPEDLKIAELIVRVALAIALLAHAIALLLELASSSDEEVSETAKQLAENLRKLIEELLRMIEKIKNSTDPEDLKIAELIVRVALAIALLAEAIALLLQLASSSDEEVSETAKQLAENLRKLIEELLRMIEKIKNSTDPEDLRRAKSIVIVARIIAQLAFLIAELLESASSSDEHVRRAAKYVAHLLREAIEFLKRTIERTKN

SEQ ID NO: 2013 - protein, 265 aa, synthetic construct
  REGION 1..265: note = Synthetic
DEIEEAIRIIKHILLEVFELMKQAEQRGDEESYRLAKEILRLVKELLEKAHQAYEAGDLKTVQVALAIAIILLILLEVFELMKQAEQRGDEESYRLAKEILRLVKELLEKAIQASEAGDLKTVQVALAIAIILLILLEVFELMKQAEQRGDEESYRLAKEILRLVKELLEKAIQASEAGDLKTVQVALAIAIILLILLEVFELMKQAEQRGDEESFRLAERIFYLVKVLLEIAIRASEAGDLRLVRLALYAAESLLQILELFEKS

SEQ ID NO: 2014 - protein, 265 aa, synthetic construct
  REGION 1..265: note = Synthetic
DEDAHAIYLILRIFQEVFELMKQAEQRGDEESYRLAKEILRLVEELFREAVRALEEGDLKTVQVALAIAIILLILLEVFELMKQAEQRGDEESYRLAKEILRLVKELLEKAIQASEAGDLKTVQVALAIAIILLILLEVFELMKQAEQRGDEESYRLAKEILRLVKELLEKAIQASEAGDLKTVQVALAIAIILLILLEVFELMKQAEQRGDRESLKLARTILEIVKQALEQAIQASEAGDLKTVQEALRLAELLLNVLKTFERH

SEQ ID NO: 2015 - protein, 265 aa, synthetic construct
  REGION 1..265: note = Synthetic
DEAELLIEEVEHLYRLILNQFERLEEEGDEEAARRAKEILERLKELLEQVFESFQLGDPEKATAIALIAQVLFLYIQIFEQMKRLEKEGDEEAARRAKEILERLKELSEQVFESFQLGDPEKATAIALIAQVLFLYIQIFEQMKRLEKEGDEEAARRAKEILERLKELSEQVFESFQLGDPEKATAIALIAQVLFLYIQIFELMKHLEKQGDEEAARVAKEILERLKELSEQVFESFQLGDPHKARRIALEAHVLFYRIKLFIRN

SEQ ID NO: 2016 - protein, 296 aa, synthetic construct
  REGION 1..296: note = Synthetic
SELEQMLLEAQQILLEAEQFLKEVLQYFRQFGGEEALEFLQRFKEIWEKIKRLIEQIERSAAAGDPEKVKLLLMIVEALQILLEALKYLLEVLQYFRQFGGEEALEFLQRFKEIWEKIKRLIEQIERSAAAGDPEKVKLLLMIVEALQILLEALKYLLEVLQYFRQFGGEEALEFLQRFKEIWEKIKRLIEQIERSAAAGDPEKVKLLLMIVEALQILLEALKYLLEVLQYFRQFGGEEALEFLQRFKEIWEKIKRLIEQIERSAAAGDPHKVRRLLLLVRTLLHELRSLKLLLES

SEQ ID NO: 2017 - protein, 296 aa, synthetic construct
  REGION 1..296: note = Synthetic
DELERMILKARHILREALKYLLEVLQYFRQFGGEEALEFLQRFKEIWEKIKRLIEQIERSAAAGDPEKVKLLLMIVEALQILLEALKYLLEVLQYFRQFGGEEALEFLQRFKEIWEKIKRLIEQIERSAAAGDPEKVKLLLMIVEALQILLEALKYLLEVLQYFRQFGGEEALEFLQRFKEIWEKIKRLIEQIERSAAAGDPEKVKLLLMIVEALQILLEALKYLLEVLQYFRQFGGEEALEFLQRFKEIWEKIKRLIEQIERSAAAGDPRDVRVLLQYVRLLQQLLELLKEQLES

SEQ ID NO: 2018 - protein, 254 aa, synthetic construct
  REGION 1..254: note = Synthetic
DREEQFLIKVSLSALYVILIAERAGNEEMIEEARRLFEEVKKLFERLVNATTEEQQKQALLSAKLLYVLISALLVIIWAIQAGNEEMIEEARRLFEEVRKLFERLRNATTEEQQKQALLSAKLLYVLISALLVIIYAILAGNEEMIEEARRLFEEVRKLFERLRNATTEEQQKQALLSAKLLYVLISALLVIIFAIRAGNEEMIEEARRLFEEVRKLFERLRNATTEEQQKQALLSAEELYYEILVLLDQIFRL

SEQ ID NO: 2019 - protein, 223 aa, synthetic construct
  REGION 1..223: note = Synthetic
DRELIIILEALLLAHKLLQLAKEMGDEESFQILREVLQTLREALKKIEETGDPRALEIARMLYIILRALELAIKLLQLAKEMGDEESFQILREVLQTLLEALKKISETGDPRALEIARMLYIILRALELAIKLLQLAKEMGDEESFQILREVLQTLLEALKKISETGDPRALEIARLLFEILLLLEIAIKLLQQAKEMGDEELFRTLKRILEHLLHILKLTSE

SEQ ID NO: 2020 - protein, 226 aa, synthetic construct
  REGION 1..226: note = Synthetic
DELELLALEIKYFARLVERIVKRYGLPESLQEIVRLILELVRKASQTGDEESMRLALLAAKIAYYAALVLSIVKEYGLPESLQEIVRLILELVRKASQTGDEESMRLALLAAKIAYYAALVLSIVKEYGLPESLQEIVRLILELVRKASQTGDEESMRLALLAAKIAYFAALVLSIVKEYGLPESLQEIVRLILELVRKASQTGDERKMYKALVLAILAFALARLN

SEQ ID NO: 2021 - protein, 223 aa, synthetic construct
  REGION 1..223: note = Synthetic
DEMEEIIIQALLLAQRLLRLAKEMGDEESFQILREVLQTLLEALKKISETGDPRALEIARMLYIILRALELAIKLLQLAKEMGDEESFQILREVLQTLLEALKKISETGDPRALEIARMLYIILRALELAIKLLQLAKEMGDEESFQILREVLQTLLEALKKISETGDPRALEIARMLYEILRNLEEAIELLQQAKEMGDEELFQLVRRTLERLLELLKEISE

SEQ ID NO: 2022 - protein, 240 aa, synthetic construct
  REGION 1..240: note = Synthetic
LELIRLLKKIELILQRAETFAKQAGDEETMERIKQQLRETQEKVRTLSPEEIKKFLELIYLLALIVLLLVIALYFALLAGDEETMERIKQQLRETQEKVRTLSPEEIKKFLELIYLLALIVLLLVQALYFAKLAGDEETMERIKQQLRETQEKVRTLSPEEIKKFLELILLLALIVLLLVQALYFAKLAGDEETMERIKQQLRETQEKVRTLSPEEIKRFLQEIYELALRVLFRVQELYS

SEQ ID NO: 2023 - protein, 247 aa, synthetic construct
  REGION 1..247: note = Synthetic
LATERILEEVFDQIHFLFRQSLERSTDEETIRRVLEEALRIALLIAQELGLGEEEAKRLATKAILEVVFQWIILLFKKSLQRSTDEETIRRVLEEALRIALLIAQELGLGEEEAKRLATKAILEVVFQWIIELFKQSLQRSTDEETIRRVLEEALRIALLIAQELGLGEEEAKRLAVKAINEVVRQWIIELFKQSLQRSTDEETIRRVLEEALRIALLIAQELGLGEEFAEQLAELAILIVEFEFRL

SEQ ID NO: 2024 - protein, 247 aa, synthetic construct
  REGION 1..247: note = Synthetic
SETERVKTEVHVYIHYLFRLSLQRSTDEETIRRVLEEALRIALLIAQELGLGEEEAKRLATKAILEVVFQWIIELFKQSLQRSTDEETIRRVLEEALRIALLIAQELGLGEEEAKRLATKAILEVVFQWIIELFKQSLQRSTDEETIRRVLEEALRIALLIAQELGLGEEEAHRLATRAIFRVVFQWIEELFKQSLQRSTDEETIRRVLEEALRIALLIAQELGLGEEVAENLAKAAIHFVLLEFLL

SEQ ID NO: 2025 - protein, 247 aa, synthetic construct
  REGION 1..247: note = Synthetic
DETERILERVHLEIRQLFLESLRESTDEETIRRVLEEALRIALLIAQELGLGEEEAKRLATKAILEVVFQWIIELFKQSLQRSTDEETIRRVLEEALRIALLIAQELGLGEEEAKRLATKAILEVVFQWIIELFKQSLQRSTDEETIRRVLEEALRIALLIAQELGLGEEEAHRLAVEAILEVVRQWIIELFKQSLQRSTDEETIRRVLEEALRIALLIAQELGLGERHAETLAKIAILIVHREWDL

SEQ ID NO: 2026 - protein, 263 aa, synthetic construct
  REGION 1..263: note = Synthetic
SEELLQFLYQVWEIYQRLRELLEKATDEEKYEQIRQILEIIKQAFERAVELFKQGDFEKAITVLELAVMLWRVWEIYQRLRELLEKATDEEKYEQIRQILEIIKQAFERAVELFKQGDFEKAITVLELAVMLWRVWEIYQRLRELLEKATDEEKYEQIRQILEIIKQAFERAVELFKQGDFRKAITVLELAVMLWRVWEIYQRLRELLEKATDEHEYHLIRHILEIIKQAFELAVELFKQGDFDKALLNLEAAVHIFLVYERL

SEQ ID NO: 2027 - protein, 263 aa, synthetic construct
  REGION 1..263: note = Synthetic
SEELRRLLALVLFIYEHLRELLEKATDEEKYEQIRQILEIIKQAYERAVELFKQGDFEKAITVLELAVMLFEVWEIYQRLRELLEKATDEEKYEQIRQILEIIKQAFERAVELFKQGDFEKAITVLRLAVMLWRVWEIYQRLRELLEKATDEEKYEQIRQILEIIKQAFERAVELFKQGDFRKALNVLTLAVMLWRVWEIYQRLRELLEKATDEEKYELIRRILEEIKQAFERAVELFKQGDYFEALVLLYQAVTTAEIFEEL

SEQ ID NO: 2028 - protein, 258 aa, synthetic construct
  REGION 1..258: note = Synthetic
DHLEALILQAAVDILELLHLARKEGDEETQKYAERAYQIVEEMLERAQRDPELLKEVVRQIRLLQFIIKAAILILELLERAKKEGDEETQKYAERALQIVLEMLERAQRDPELLKEVVRQIRLLQFIIKAAILILELLERAKKEGDEETQKYAERALQIVLEMLERAQRDPELLKEVVRQIRLLQFIIKAAILILELLERAKKEGDEETQKYAERALQIVLEMLERAQRDPELLKEVVEQILRLLTEIEVAIRELERL

SEQ ID NO: 2029 - protein, 254 aa, synthetic construct
  REGION 1..254: note = Synthetic
DEEIYRMLLRIRELVFRIRRLIREIEKQGQGEEAKELYKIAKEVLQQAVEARRRGDKETVEIALMIAQIALLVAQIFKLIREIEKQGQGEEAKELYKIAKEVLQQAVEARRRGDKETVEIALMIAQIALLVAQIFKLIREIEKQGQGEEAKELYKIAKEVLQQAVEARRRGDKETVEIALMIAQIALLVAQIFKLIREIEKQGQGERAKELYKIAKEVLQQAVEARRRGDKTTVYEALLIAFYALEVAKLIKED

SEQ ID NO: 2030 - protein, 254 aa, synthetic construct
  REGION 1..254: note = Synthetic
TERIKTILQIIEELVTLIRFIILAIRAHGQGEEAEELYKIAKEVLQQAVEARRRGDKETVEIALMIAQIALLVAQIFLLILIIERQGQGEEAKELYKIAKEVLQQAVEARRRGDKETVEIALNIARIALLVAQIFHLIRFIELLGQGEEAKELYKIAKEVLQQAVEARRRGDKETVKIAVMIAIIALIVAQIFRLIVEIEERGQGEEAKELYKIAKEVLQQAVEARRRGDEETVKEALRIALRALSDAHVLKLS

SEQ ID NO: 2031 - protein, 226 aa, synthetic construct
  REGION 1..226: note = Synthetic
DRLEKLELEIRYFALSVELIVKVYGLPESLQEIVRLILELVRKASQTGDEESMRLALLAAKIAYYAALVLSIVKQFGLPESLQEIVRLILELVRKASQTGDEESMRLALLAAKIAYYAALVLSIVKEYGLPESLQEIVRLILELVRKASQTGDEESMELALLAARIAYLAALVLSIVKEYGLPESLQEIVRLILELVRKASQTGDFESMLKAYELAVRAFLKARLL

SEQ ID NO: 2032 - protein, 254 aa, synthetic construct
  REGION 1..254: note = Synthetic
TVEIELMLERILKIVLLIEFYIILIERQGQGEEAKELYKIAKEVLQQAVEARRRGDKETVEIALMIAQIALLVAQIFHLIREIEKQGQGEEAKELYKIAKEVLQQAVEARRRGDKETVEIALMIAQIALLVAQIFKLIREIEKQGQGEEAKELYKIAKEVLQQAVEARRRGDKETVEIALMIAQIALLVAQIFKLIREIEKQGQGEEAKELYKIAKEVLQQAVEARRRGDKKTVRHAYLVALLALTQAEILKLS

SEQ ID NO: 2033 - protein, 254 aa, synthetic construct
  REGION 1..254: note = Synthetic
DKEIQHMLNRIIFLVLNIRVLIELIERQGQGEEAKELYKIAKEVLQQAVEALRRGDKETVEIALMIAQIALLVAQIFELIREIEKQGQGEEAKELYKIAKEVLQQAVEARRRGDKETVEIALMIAQIALLVAQIFKLIREIEKQGQGEEAKELYKIAKEVLQQAVEARRRGDKETVEIALMIAQIALLVAQIFKLIREIEKQGQGEKAKELYKIAKEVLQQAVEARRRGDRETVLRALHIARFALQLAQTLKES

SEQ ID NO: 2034 - protein, 273 aa, synthetic construct
  REGION 1..273: note = Synthetic
DQFDEIMNRIRILLKKLVEIFKRLKQRGDIEEAQEVWEQWQRLLELLEEAYRLWKENPEKALKTLQFALIMALIVILLYILVEIFKRLKQRGDIEEAQEVWEQWQRLLELLEEAYRLWKENPEKALKTLQFALIMALIVILLYILVEIFKRLKQRGDIEEAQEVWEQWQRLLELLEEAYRLWKENPEKALKTLRFALIMALIVILLYILVEIFKRLKQRGDIEDAQFVWEHWQRLLELLEEAYRLWKENPKRALQVLEIALFIALAVILLYIS

SEQ ID NO: 2035 - protein, 250 aa, synthetic construct
  REGION 1..250: note = Synthetic
SELFHRLRLEALSLLFIIKTLWEETGDEELWRSLQEVVRTIRKAVELYQQGNIEEAIKSLLFAYLMLEALLLVYEIKRLWEQTGDEELWRSLQEVVRTIRKAVELYQQGNIEEAIKSLLFAYLMLEALLLVYRIKKLWEQTGDEELWRSLQEVVRTIRKAVELYQQGNIEEAIKSLLFAYLMLEALLLVYRIKKLWEQTGDEELWRSLQEVVRTIRKAVELYQQGNIEKALLVLFQALLILLELEYYFHS

SEQ ID NO: 2036 - protein, 247 aa, synthetic construct
  REGION 1..247: note = Synthetic
DEKFRHLEYEIRLFWRLVREIWEQTGDEKAYRVAQRAWESMQKAYESFEAGDKEEALKILKFALLILQIFLLWVEVREIWEQTGDEKAYRVAQRAWESMQKAYESFEAGDKEEALKILKFALLILQIFLLWVEVREIWEQTGDEKAYRVAQRAWESMQKAYESFEAGDKEEALLILLFALLILQIFLLWVEVREIWEQTGDEKAYRVAQRAWESMQKAYESFEAGDIHEALALLYHALILLELFLKS

SEQ ID NO: 2037 - protein, 281 aa, synthetic construct
  REGION 1..281: note = Synthetic
DHKLKELMEIVEELLRYLRFLFEELKQEGDEEEAQRVFESLQRIRELLEKAFQSFEQGNQEEALRIVKLAQLMLIVTILLIYLQRIFEELKQEGDEEEAQRVFESLQRIRELLEKAFQSFEQGNQEEALRIVKLAQLMLIVTILLIKLQEIFRRLKQEGDEEEAQRVFESLQRIRELLEKAFQSFEQGNQKEALLIVKLAQLMLIVTILLIRLQETFEKLKQEGDEEEAQRVFESLQRIRELLEKAFQSFEQGNILEALRIVLHAIHLLRETIEHIKLVRT

SEQ ID NO: 2038 - protein, 281 aa, synthetic construct
  REGION 1..281: note = Synthetic
SEEIRELEEQIRILLLYLEKTVREMKKRGDEEEAEQIERTVREALELLRQAIESYQQGNMEEAKKILEIALLILQIAILIILLKRTVREMKKRGDEEEAEQIERTVREALELLRQAIESYQQGNMEEAKLILEIALLILQIALLIIKLKRTVREMKKRGDEEEAEQIERTVREALELLRQAIESYQQGNLSEAYLILVIALLILQIALLIIKLKRTVREMKKRGDEEEAEHIERIVREALELLRQAIESYQQGNLEEAYHILLEALASLLSALFIIRIKRS

SEQ ID NO: 2039 - protein, 254 aa, synthetic construct
  REGION 1..254: note = Synthetic
SLEIEHLINEALLFIIQALIIARRTGSEELLQLVRMAAELVKEVWESFKQGNMEEVLKQAQIALFIARAISYIAQAYEIAKRTGSEELLQLVRMAAELVKEVWESFKQGNMEEVLKQAQIALFIARAISYIAQAYEIAKRTGSEELLQLVRMAAELVKEVWESFKQGNMEEVLKQAQIALFIARAISFIAQAYEIAKRTGSEELLQLVRMAAELVKEVWESFKQGNMEEVLHLARRALLFAQLISLIAELFEHS

SEQ ID NO: 2040 - protein, 254 aa, synthetic construct
  REGION 1..254: note = Synthetic
SLEIEILLLRARIFILEAQIIAERTGSEELLQLVRMAAELVKEVWESFKQGNMEEVLKQAQIALFIARAISYIAQAYEIAKRTGSEELLQLVRMAAELVKEVWESFKQGNMEEVLKQAQIALFIARAISYIAQAYEIAKRTGSEELLQLVRMAAELVKEVWESFKQGNMEEVLKQAQIALFIARAISYIAQAYEIAKRTGSEELLQLVRMAAELVKEVWESFKQGNMEEVKDLAERALLFARYISDEARLYERS

SEQ ID NO: 2041 - protein, 254 aa, synthetic construct
  REGION 1..254: note = Synthetic
QEQIEEFIFRARKYIRQAYEIAKRTGSEELLQLVRMAAELVKEVWESFKQGNMEEVLKQAQIALFIARAISYIAQAYEIAKRTGSEELLQLVRMAAELVKEVWESFKQGNMEEVLKQAQIALFIARAISYIAQAYEIAKRTGSEELLQLVRMAAELVKEVWESFKQGNMEEVLKQAQIALFIARAISYIAQAYEIAKRTGSEELLQYVRKAAEIVKEVWESFKQGNMEEVLHRAETALIYARAISLLARYFELS

SEQ ID NO: 2042 - protein, 194 aa, synthetic construct
  REGION 1..194: note = Synthetic
DELEVNVDLARVVVEHAEKAGVDPKALELVIRIVIEALQRGDLELAQLALTVALALFNVIQAERAGVDPKALELVIRIVIEALQRGDLELARLALTVARALLMVIKAEEAGVDPKALELVIRIVIEALQRGDVNLALLALYVARALLMVIKAEEAGVDPKALELVIRIVIEALQRGDNHLAAHALILALELLLS

SEQ ID NO: 2043 - protein, 254 aa, synthetic construct
  REGION 1..254: note = Synthetic
SREIERLILQARIFIIHAEEIARRTGSEELLQLVRMAAELVKEVWESFKQGNMEEVLKQAQIALFIARAISYIAQAYEIAKRTGSEELLQLVRMAAELVKEVWESFKQGNMEEVLKQAQIALFIARAISYIAQAYEIAKRTGSEELLQLVRMAAELVKEVWESFKQGNMEEVLKQARIALLIARAISYIAQAYEIAKRTGSEELLQLVRMAAELVKEVWESFKQGNLKEVYDLAVEALLFAILISHRARTFEES

SEQ ID NO: 2044 - protein, 253 aa, synthetic construct
  REGION 1..253: note = Synthetic
DDLEVLILRARALVHEIRSIARRTGDEELKELVKIIWELIKQLAELSRQGDYEEALKTVKLILLMAQAVLLVALISTLARQTGDEELKELVKIIWELIKQLAELSRQGDYEEALKTVKLILLMAQAVLLVALISTLARQTGDEELKELVKIIWELIKQLAELSRQGDYEEALKTVELILLMAQAVLLVALISTLARQTGDEELKELVKIIWELIKQLAELSRQGDYEEARKTVLRILIFAYLVLRIALRSTLA

SEQ ID NO: 2045 - protein, 263 aa, synthetic construct
  REGION 1..263: note = Synthetic
DQEQKIRHLLQQVEIFLEDVEHYLKKAKGEESRQLRELIRIAMELAKEAFELTQQGNIEEALQLAKIALLIAQVVLYLARVIEYLKFAKGEESRQLRELIRIAMELAKEAFELTQQGNIEEALQLAKIALLIAQVVLYLAQVIKYLKFAKGEESRQLRELIRIAMELAKEAFELTQQGNIEEALLLAKIALLIAQVVLYLAQVIKYLKFAKGEESRQLRELIRKAMELAKEAFELTQQGNILEALSLALLALLVARLVLRLAQ

SEQ ID NO: 2046 - protein, 284 aa, synthetic construct
  REGION 1..284: note = Synthetic
SLFEKIEKLLTEIRSLLQRARLLIKEHEQQGDEETYRQMKELLQLVLEIAKQAVEYARAGRLEEALLFAKIALLLARILVLLLLASRLIREHEKQGDEETYRQMKELLQLVLEIAKQAVEYARAGRLEEALLFAKIALLLARILVLLLLASRLIREHEKQGDEETYRQMKELLQLVLEIAKQAVEYARAGRLEEALLFAKIALLLARILVLLLLASRLIREHEKQGDEETYRQMKELLQLVLEIAKQAVEYARAGRLEEALRLAERALTLAFLLFLLLHLAKLS

SEQ ID NO: 2047 - protein, 284 aa, synthetic construct
  REGION 1..284: note = Synthetic
DLEERITYILARIRLLLLEAEKLIREHEKQGDEETYRQMKELLQLVLEIAKQAVEYARAGRLEEALLFAKIALLLARILVLLLLASRLIREHEKQGDEETYRQMKELLQLVLEIAKQAVEYARAGRLEEALLFAKIALLLARILVLLLLASRLIREHEKQGDEETYRQMKELLQLVLEIAKQAVEYARAGRLEEALLFAKIALLLARILVLLLLASRLIREHEKQGDEETYRQMKELLQLVLELAKQAVELARAGRLERAETAAKVALARAHLLLDELELTRQS

SEQ ID NO: 2048 - protein, 284 aa, synthetic construct
  REGION 1..284: note = Synthetic
DLEEEIRKILLQIEYLLTIAKQLIREHEKQGDEETYRQMKELLQLVLEIAKQAVEYARAGRLEEALLFAKIALLLARILVLLLLASRLIREHEKQGDEETYRQMKELLQLVLEIAKQAVEYARAGRLEEALLFAKIALLLARILVLLLLASRLIREHEKQGDEETYRQMKELLQLVLEIAKQAVEYARAGRLEEALLFAKIALLLARILVLLLLASRLIREHEKQGDEETYRQMKELLQLVLEIAKQAVEYARAGRLEEALRLAHYALLLAKVLLILLELSRLS

SEQ ID NO: 2049 - protein, 284 aa, synthetic construct
  REGION 1..284: note = Synthetic
LLREKIRELLEEIHVLLEYAKSLIRRHEDQGDEETYRQMKELLQLVLEIAKQAVEYARAGRLEEALLFAKIALLLARILVLLLLASRLIREHEKQGDEETYRQMKELLQLVLEIAKQAVEYARAGRLEEALLFAKIALLLARILVLLLLASRLIREHEKQGDEETYRQMKELLQLVLEIAKQAVEYARAGRLEEALLFAKIALLLARILVLLLLASRLIREHEKQGDEETYRQMKELLQLVLEIAKQAVEYARAGRLEEAERLALRALLLANILFLLLLLRRTS

SEQ ID NO: 2050 - protein, 284 aa, synthetic construct
  REGION 1..284: note = Synthetic
DLQEEIEHLLLQIELLLRYAEILIRKHEKQGDEETYRQMKELLQLVLEIAKQAVEYARAGRLEEALLFAKIALLLARILVLLLLASRLIREHEKQGDEETYRQMKELLQLVLEIAKQAVEYARAGRLEEALLFAKIALLLARILVLLLLASRLIREHEKQGDEETYRQMKELLQLVLEIAKQAVEYARAGRLEEALRFAEIALLLARILVLLLLASRLIREHEKQGDEETYRQMKELLQLVLEIAKQAVEYARAGRLTEAYRFALQALVLALQLVFLLEQARKS

SEQ ID NO: 2051 - protein, 284 aa, synthetic construct
  REGION 1..284: note = Synthetic
LLFEKIQKLLQKIRVLLHLAHHLIRNHEQQGDEETYRQMKELLQLVLEIAKQAVEYARAGRLEEALLFAKIALLLARILVLLLLASELIREHEKQGDEETYRQMKELLQLVLEIAKQAVEYARAGRLEEALLFAKIALLLARILVLLLLASRLIREHEKQGDEETYRQMKELLQLVLEIAKQAVEYARAGRLEEALLFAKIALILARILVLLLLASRLIREHEKQGDEETYRQMKELLQLVLEIAKQAVEYARAGRLREALKLALEALILALELVIRLEQVRLS

SEQ ID NO: 2052 - protein, 268 aa, synthetic construct
  REGION 1..268: note = Synthetic
DEEEKLHILILEVRSLFFRIELLVRKISDEETIRQLQETMERILESLKKALELFRKDPEKALQLAKLALIIAQVLLLFALIWELVAQISDEETIRQLQETMERILESLKKALELFRKDPEKALQLAKLALIIAQVLLLFALIWELVAQISDEETIRQLQETMERILESLKKALELFRKDPEKALQLAKLALIIAQVLLLFALIWELVAQISDEETIRQLQETMERILESLKKALELFRKDPEKALKLAKEALELAHRLLNTAREWEEV

SEQ ID NO: 2053 - protein, 199 aa, synthetic construct
  REGION 1..199: note = Synthetic
EELEQMVEELAELATKTLKQGDQELAVYLLEIASIALLAALSVQELQRAGFDEELLQMVIELLIQALRTVKQGDYELAKYLAEIALIAVEAALSVFELQRAGFDEELLQMVIELLIQALRTVKQGDYELAKYLAEIALIAVEAALSVFELQRAGFDEELLQMVIELLIQALRTVKQGDYELARRLAEEALRAVREALRV

SEQ ID NO: 2054 - protein, 268 aa, synthetic construct
  REGION 1..268: note = Synthetic
DQLFELKIIILRVEILFLQIKHLVEKISDEETIRQLQETMERILESLKKALELFRKDPEKALQLAKLALIIAQVLLLFALIWELVAQISDEETIRQLQETMERILESLKKALELFRKDPEKALQLAKLALIIAQVLLLFALIWELVAQISDEETIRQLQETMERILESLKKALELFRKDPEKALQLAKLALIIAQVLLLFALIWELVAQISDEETIRQLQETMERILESLKKALELFRKDPDKAEILALRAYLLALELLLIARHWELV

SEQ ID NO: 2055 - protein, 266 aa, synthetic construct
  REGION 1..266: note = Synthetic
DERELRMHRIVYHAKFTALLAHLLARRAGDEEALELIRIVIQLLTEIVKLSKSGDEETFERALQFAEMILTVALAVYLALRAYELAKRAGDEEALELIRIVIQLLTEIVKLSKSGDEETFERALQFAEMISTVAEAVLLALQAYELAKRAGDEEALELIRIVIQLLTEIVKLSKSGDEETFERAYLFARMISIVAEAVLLALQAYELAKRAGDEEALELIRIVIQLLTEIVKLSKSGDEETFERALQLAARILTIAELVLRKLQKY

SEQ ID NO: 2056 - protein, 266 aa, synthetic construct
  REGION 1..266: note = Synthetic
SEEEIEMHSIVFEALLLALRAHRLAKRAGDEEALELIRIVIQLLTEIRKLSKSGDEETFERALQFAEMILTVAEAVLLALQAYELAKRAGDEEALELIRIVIQLLTEIVKLSKSGDEETFERALQFAEMISTVAEAVLLALQAYELAKRAGDEEALELIRIVIQLLTEIVKLSKSGDEETFERALQFAEMISVVAEAVLLALQAYELAKRAGDEEALELIRIVIQLLTEIVKLSKSGDEETFRRARELAYRISVNARLVLEKLQEY

SEQ ID NO: 2057 - protein, 266 aa, synthetic construct
  REGION 1..266: note = Synthetic
ALQFREMERTVRRARYLASLAYQLAKEAGDEEALELIRIVIQLLTEIVKLSKSGDEETFERALQFAEMISTVAEAVYLALEAYFHAKQAGDEEALELIRIVIQLLTEIVKLSKSGDEETFERALQFAEMISIVAEAVLLALQAYELAKRAGDEEALELIRIVIQLLTEIVKLSKSGDEETFERALRFAEMILIVALAVLLALQAYELAKRAGDEEALELIRIVIQLLTEIVKLSKSGDEETFERALHFAVRILSLALEVLTKLRVS

SEQ ID NO: 2058 - protein, 269 aa, synthetic construct
  REGION 1..269: note = Synthetic
DEEYTQIEILALQAELLVRRIYRLAKETGDPEYLEVAKTLLELILEMLRISKNAKTEEQFQRALEYLQIILTAAQAALLVLEIYQLAKETGDPEYLEVAKTLLELILEMLRISKNAKTEEQFQRALEYLQIILTAAQAALLVLEIYQLAKETGDPEYLEVAKTLLELILEMLRISKNAKTEEQFQRALLYLEIILIAAQAALLVLEIYQLAKETGDPEYLEVAKTLLELILEMLRISKNAKTEEQFIRAYEVLSRIYVTARVALLRLEL

SEQ ID NO: 2059 - protein, 269 aa, synthetic construct
  REGION 1..269: note = Synthetic
DEEYTEIRNTAYRAKLLVLEIEYLARETGDPEYLEVAKTLLELILEMLRISKNAKTEEQFQRALEYLQIILTAAQAALLVLEIYELARKTGDPEYLEVAKTLLELILEMLRISKNAKTEEQFQRALEYLQIILTAAQAALLVLEIYQLAKETGDPEYLEVAKTLLELILEMLRISKNAKTEEQFERALRYLEIILLAAQAALLVLEIYQLAKETGDPEYLEVAKTLLELILEMLRISKNAKTEEQFERAFRYLLQIYLLAREALFELRS

SEQ ID NO: 2060 - protein, 257 aa, synthetic construct
  REGION 1..257: note = Synthetic
DKIEEIRERAYKLVNLVRRTAEKLSRQAKNEEEMEQAQEFLEEAVKLWRQARATTDPEELKIILILLQALLLVLLVSLTAIKLSRQAKNEEEMEQAQEFLEEAVKLWRQARATTDPEELKIILILLQALLLVLLVSLTAIKLSRQAKNEEEMEQAQEFLEEAVKLWRQARATTDPEELKIILILLQALLLVLLVSLTAIKLSRQAKNEELMEEAQEFLEEAVKLWRQARATTDPQELLQILILLLSLLLLLEVNLRS

SEQ ID NO: 2061 - protein, 257 aa, synthetic construct
  REGION 1..257: note = Synthetic
DEREEILLKAQRLVLLVKQTAEKLSRQAKNEEEMEQAQEFLEEAVKLLRQARATTDPEELKIILILLQALLLVLLVSLTAIKLSRQAKNEEEMEQAQEFLEEAVKLWRQARATTDPEELKIILILLQALLLVLLVSLTAIKLSRQAKNEEEMEQAQEFLEEAVKLWRQARATTDPEELKIILILLQALLLVLLVSLTAIKLSRQAKNEEEMEEAQRLLEEAVKLWRQARATTDPEELRRILLELRVLLEYLRTLLHS

SEQ ID NO: 2062 - protein, 257 aa, synthetic construct
  REGION 1..257: note = Synthetic
DQREEILEKIQELVLQVQVTAILVMHLAGDEEKSKKAQEFLEEAERLARQAASTTDPEELQRYLILITILLLVLLVSFTALLVMRLAGDEEKSKKAQEFLEEAERLARQAASTTDPEELKRYLILITILLLVLLVSLTALKVMKEAGDEEKSKKAQEFLEEAERLARQAASTTDPEELHRYLILIEILLLVLLVSLTALRVMKEAGDEEKSKEAQENLEEAERLARQAASTTDPRELLEILVKIRRLLHYLELLLRS

SEQ ID NO: 2063 - protein, 257 aa, synthetic construct
  REGION 1..257: note = Synthetic
LQREKILQKIYHLVLEVRYTARLVMREAGDEEKSKKAQEFLEEAERLARQAASTTDPEELQRYLILITILLLVLLVSLTALRVMKEAGDEEKSKKAQEFLEEAERLARQAASTTDPEELQRYLILITILLLVLLVSLTALRVMKEAGDEEKSKKAQEFLEEAERLARQAASTTDPEELERYLILITILLLVLLVSLTALRVMKEAGDEEKSKKAQEFLEEAERLARQAASTTDPRELLEYLVLILFLLLQLENQLRL

SEQ ID NO: 2064 - protein, 210 aa, synthetic construct
  REGION 1..210: note = Synthetic
DRERLYEAFANFVVTYARLNGAGVETAEELLQRLLEAIKEGDWEKIQEIYRLLKYLLHALQVVKTARENGAGVETAEELLQRLLEAIKEGDWEKIQEIYRLLKYLLHALQVVKTARENGAGVETAEELLQRLLEAIKEGDERRIVHIFFLLQFLLHALQVVKLARENGAGVETAEELLQRLLEAIKEGDLRKISHIFHLLVELYLRLIES

SEQ ID NO: 2065 - protein, 269 aa, synthetic construct
  REGION 1..269: note = Synthetic
DEQEIKAYELVRRIEKYVRVISELAKRRGDEELLKTAQQIMEEAIRLLRQLKEANDPEKLEFYLQLITAALLVVQISFYVTVISELAKRRGDEELLKTAQQIMEEAIRLLRQLKEANDPEKLEFYLQLITAALLVVQISFYVTVISELAKRRGDEELLKTAQQIMEEAIRLLRQLKEANDPEKLEFYLQLITAALLVVQISFYVTVISELAKRRGDELALKLAQQLMEEAIRLLRQLKEANDPELLKFYLVLIKSALFTVILIVEHTVS

SEQ ID NO: 2066 - protein, 259 aa, synthetic construct
  REGION 1..259: note = Synthetic
DIELEYLLKRAKTVAELIEQLARRAGSEEMLEAARQVIELVLQAYELTQSGKLPWEEIFRFVELVLLLVLAALIALRIYILAKKAGSEEMLEAARQVIELVLQAYELTQSGKLPWEEIFRFVELVLLLVLAALIALKIYILAKKAGSEEMLEAARQVIELVLQAYELTQSGKLPWEEIFKFVELVLLLVLAALIALKIYILAKKAGSEEMLEAARQVIELVLQAYELTQSGKLPWEEIYRFVLQVLLEVRLALQELKEY

SEQ ID NO: 2067 - protein, 216 aa, synthetic construct
  REGION 1..216: note = Synthetic
DEEELIRILFELAKLYFEFIEHLLHKIKKAGIDVTELEELFQLVREVAQELIKRAKNAKSEEQAHTLARIALLLVLALLIFALIMEILFRIKQAGIDVTELEELFQLVREVAQELIKRAKNAKSEEQAYTLARIALILVLALLYFAQIMELLFRIKQAGIDVTELEELFQLVREVAQELIKRAKNAKSVEEAYALALEALALVLQLLSEAIRFYLL

SEQ ID NO: 2068 - protein, 265 aa, synthetic construct
  REGION 1..265: note = Synthetic
DREEQLEFRIHLIALRVKEIIKKLQRSDSQEIREHSRELLELLKEALRLAKQASEAGDPEKLQIALLLVLIVLIAALVMLIILKLQRSDSQEIREHSRELLELLKEALRLAKQASEAGDPEKLQIALLLVLIVLIAALVMLIILKLQRSDSQEIREHSRELLELLKEALRLAKQASEAGDPEKLQIALLLVLIVLIAALVMLIILKLQRSDSQEIREHSRELLELLKEALRLAKQASEAGDPRLLRQALSIVETVLSRAEELLRS

SEQ ID NO: 2069 - protein, 265 aa, synthetic construct
  REGION 1..265: note = Synthetic
DQIAELLELIREIALQVELIIRLLQRSDSQEIREHSRELLELLKEALRLAKQASEAGDPEKLQIALLLVLIVLIAALVMRIILELQRSDSQEIREHSRELLELLKEALRLAKQASEAGDPEKLQIALLLVLIVLIAALVMLIILKLQRSDSQEIREHSRELLELLKEALRLAKQASEAGDPEKLRIALLLVRIVLIAALVMLIILKLQRSDSQEIREHSRELLELLKEALRLAKQASEAGDPHKLVRAYELVLRVLTEAESALLH

SEQ ID NO: 2070 - protein, 273 aa, synthetic construct
  REGION 1..273: note = Synthetic
SRLRQIALEVKALLLQAEAALLEIEEQNRGDEQMKRIVELALEILRRVLEILLEAIQRGDPKLLELAWWAAQVVYLLALAFLLLTRIKEENRGDEQMKRIVELALEILRRVLEILLEAIQRGDPKLLELAWWAAQVVYLLALAFLLLTRIKEENRGDEQMKRIVELALEILRRVLEILLEAIQRGDPKLLELAWWAAQVVYLLALAFLLLTRIKEENRGDEQMKRIVELALEILRRVLEILLEAIQRGDPKLLIEAFFLAVRVFNLAELLLLR

SEQ ID NO: 2071 - protein, 273 aa, synthetic construct
  REGION 1..273: note = Synthetic
DELEIYAHEVRTLLLRAKRLLHRIKEENRGDEQMKRIVELALEILRRVLEILLEAIQRGDPKLLELAWWAAQVVYLLALAFLLLTRIKEENRGDEQMKRIVELALEILRRVLEILLEAIQRGDPKLLELAWWAAQVVYLLALAFLLLTRIKEENRGDEQMKRIVELALEILRRVLEILLEAIQRGDPKLLELAWWAAQVVYLLALAFLLLTRIKEENRGDEQMKRIVELALEILRRVLEILLEAIQRGDPQLLIEAYILALHVFLHAELLLRS

SEQ ID NO: 2072 - protein, 273 aa, synthetic construct
  REGION 1..273: note = Synthetic
DELEEIARRVKLLLHAAEFNLRIIRDLNRGDEQMKRIVELALEILRRVLEILLEAIQRGDPKLLELAWWAAQVVYLLALAFLLLTHIKRENRGDEQMKRIVELALEILRRVLEILLEAIQRGDPKLLELAWWAAQVVYLLALAFLLLTRIKEENRGDEQMKRIVELALEILRRVLEILLEAIQRGDPRLLHLAWLAARVVYILALAFLLLTRIKEENRGDEQMKRIVELALEILRRVLEILLEAIQRGDPRLLYEALKLALQVFLDAELLLLS

SEQ ID NO: 2073 - protein, 294 aa, synthetic construct
  REGION 1..294: note = Synthetic
DEEIFQLLAIIFHLVALALRLLKELKKQGSENYEEARQLIEQIERLLREVQEKAEEMERQGDPRKAISILIIATLLVTIALLVAQALRLLFELKKQGSENYEEARQLIEQIKRLLQEVKEKAEEMERQGDPRKAISILIIATLLVTIALLVAQALRLLFELKKQGSENYEEARQLIEQIKRLLQEVKEKAEEMERQGDPRKAISILIIATLLVTIALLVAQALRLLFELKKQGSENYEEARQLIEQIKRLLQEVKEIAEEMERQGDPRKAIRYLEYATQLVETALRRAEFLRES

SEQ ID NO: 2074 - protein, 231 aa, synthetic construct
  REGION 1..231: note = Synthetic
DQNRRIHILRLLAEVLEELARTLFRAVERAGDEEALELLKQTLRLVYEALERVFREFLELFEQGSFEQLLQNAKILSLLATAASMSATAALLYIYVKLAGDEEALELLKQTLRLVYEALERVFREFLELFEQGSFEQLLQNARILSNLALAASLSAEAAVLYILVKEAGDEEALELLKQTLRLVYEALERVFREFLELFEQGSFEQLERNANILVELASHASYVALQAHLS

SEQ ID NO: 2075 - protein, 203 aa, synthetic construct
  REGION 1..203: note = Synthetic
DEEEELRIELRALVLRLEQLELLLKKLGDPELAEFLKKIIEEILRAIQTSQNGNLEEAKRLAQEVKLMFELAELVYRLFELIQRLKELGDPELAEFLKKIIEEILRAIQTSQNGNLEEAKRLAQEVKLMFELAELVYRLFELIQRLKELGDPELAEFLKKIIEEILRAIQTSQNGNLREAERLASEVKHLFHEAELVYELFEL

SEQ ID NO: 2076 - protein, 297 aa, synthetic construct
  REGION 1..297: note = Synthetic
SEVFRFLLRVLEIFYIIEQLLRKLLEFAQMYPEEYYQRIKELVRQIQENAKEVVRIAKEALENGDLETVKVALFLALVLMIFAIITLLLLKLLEFAQMYPEEYYQRIKELVRQIQENAKEVVRIAKEALENGDLETVKVALFLALVLMIFAIITLLLLKLLEFAQMYPEEYYQRIKELVRQIQENAKEVVRIAKEALENGDLETVKVALFLALVLMIFAIITLLLLKLLEFAQMYPEEYYQRIKELVRQIQENAKEVVRIAKEALENGDEQRVREARVEAEYLLQFARLLLEKLRRS

SEQ ID NO: 2077 - protein, 253 aa, synthetic construct
  REGION 1..253: note = Synthetic
DELRQEAEILIKRAEHLMERLLESSNPELRELAQEISETLKELIQRLKEENSPEVLRLVILALEALILILRAIQLMQKLLESSNPELRELAQEISETLKELIQRLKEENSPEVLRLVILALEALILILRAIQLMQKLLESSNPELRELAQEISETLKELIQRLKEENSPEVLRLVILALEALILILRAIQLMQKLLESSNPELRELAQEISETLKELIQRLKEENSPHVLRHVISKLLEIIAHLELIELEQES

SEQ ID NO: 2078 - protein, 260 aa, synthetic construct
  REGION 1..260: note = Synthetic
DRREEISALVQLHLAFLAQLAKKLKKMGADSELAQKVEELFERLREIFQRVQEAGDPELLKQVLISARVATMLAILALIAAELKKMGADSELAQKVEELFERLMEIFQRVQEAGDPELLKQVLISARVATMLAILALIAAELKKMGADSELAQKVEELFERLMEIFQRVQEAGDPELLKQVLISARVATMLAILALIAAELKKMGADSELAQKVEELFERLMEIFQRVQEAGDPRLLFQVEQLAHIATHLAKLALYRAKH

SEQ ID NO: 2079 - protein, 260 aa, synthetic construct
  REGION 1..260: note = Synthetic
DKQERIKYLVRHMLQILALIAAELKKMGADSELAQKVEELFERLMEIFQRVQEAGDPELLKQVLISARVATMLAILALIAAELKKMGADSELAQKVEELFERLMEIFQRVQEAGDPELLKQVLISARVATMLAILALIAAELKKMGADSELAQKVEELFERLMEIFQRVQEAGDPELLKQVLISARVATMLAILALIAAELKKMGADSELAQKVEELFERLMEIFQRVQEAGDPRDLRHVELLALIATLLAELAKHRAES

SEQ ID NO: 2080 - protein, 260 aa, synthetic construct
  REGION 1..260: note = Synthetic
SKQEEIREHVYRMLLELELIARELKYLGADSELAQKVEELFERLMEIFQRVQEAGDPELLKQVLISARVATMLAILAYIAAELKKMGADSELAQKVEELFERLMEIFQRVQEAGDPELLKQVLISARVATMLAILALIAAELKKMGADSELAQKVEELFERLMEIFQRVQEAGDPELLKQVLISARVATMLAILALIAAELKKMGADSELAQKVEELFERLMEIFQRVQEAGDPRLLLKVLILAQEATNRAEFALIYAEL

SEQ ID NO: 2081 - protein, 260 aa, synthetic construct
  REGION 1..260: note = Synthetic
LKQELIRERVLKALLLLRVIAELLKELGADSELAQKVEELFERLMEIFQRVQEAGDPELLKQVLISARVATMLAILAFIAARLKLLGADSELAQKVEELFERLMEIFQRVQEAGDPELLKQVLISARVATMLAILALIAAELKKMGADSELAQKVEELFERLMEIFQRVQEAGDPELLKQVLISARVATHLAILALIAAELKKMGADSELAQKVEELFERLMEIFQRVQEAGDPELLQKVLEIAQKAVSRAKSALHRAES

SEQ ID NO: 2082 - protein, 260 aa, synthetic construct
  REGION 1..260: note = Synthetic
SKQEEIKRLVQEALSFLKVLAELLKKDGADSELAQKVEELFERLMEIFQRVQEAGDPELLKQVLISARVATMLAILALIAALLKLQGADSELAQKVEELFERLMEIFQRVQEAGDPELLRQVLISARVATMLAILALIAARLKLMGADSELAQKVEELFERLMEIFQRVQEAGDPELLRQVLISARVATMLAILALIAAELKKMGADSELAQKVEELFERLMEIFQRVQEAGDPELLHEVLIRALEATHRAKHALERAES

SEQ ID NO: 2083 - protein, 260 aa, synthetic construct
  REGION 1..260: note = Synthetic
DEKREIQVIVQEALVFLKHLAEHLKEKGADSELAQKVEELFERLMEIFQRVQEAGDPELLKQVLISARVARMLAILAYIAAELKKMGADSELAQKVEELFERLMEIFQRVQEAGDPELLKQVLISARVATMLAILALIAAELKKMGADSELAQKVEELFERLMEIFQRVQEAGDPELLRQVLISARVATMLAILALIAAELKKMGADSELAQKVEELFERLMEIFQRVQEAGDPQLLYKVLTIAIEATIEAEFALEKAES

SEQ ID NO: 2084 - protein, 260 aa, synthetic construct
  REGION 1..260: note = Synthetic
LKQERISRRVEEMLQFLLSLAIILKLIGADSELAQKVEELFERLMEIFQRVQEAGDPELLKQVLISARVATMLAILAFIAAQLKHRGADSELAQKVEELFERLMEIFQRVQEAGDPELLKQVLISARVATMLAILALIAARLKLSGADSELAQKVEELFERLMEIFQRVQEAGDPELLKQVLISAFVATHLAILALIAAELKKMGADSELAQKVEELFERLMEIFQRVQEAGDPRLLRHVLHLAYQATILAIRALIEARL

SEQ ID NO: 2085 - protein, 240 aa, synthetic construct
  REGION 1..240: note = Synthetic
REAKRELELFVRNHVRLIILRMRHEGVSIEEIVKEIFKTAVRLAKEFIERFGMTEEQQEELIERAAKLVLEIIVREAVKEIIQRMRQAGVSIEEIVKEIFKTAVRLAKIIIEQFGMTEEQQEELIERAAKLVLEIIVREAVKEIIQRMRQAGVSIEEIVKEIFKTAVRLAKIIIEQFGMTEEQQEELIERAAKLVLEIIVREAVKEIIQRMRQAGVSEHEIHQEIFKTRRRLEEIILRQF

SEQ ID NO: 2086 - protein, 203 aa, synthetic construct
  REGION 1..203: note = Synthetic
DEEEELRVHLLQLVFRLRRLIQRLKELGDPELAEFLKKIIEEILRAIQTSQNGNLEEAKRLAQEVKLMFELAELVYRLFELIQRLKELGDPELAEFLKKIIEEILRAIQTSQNGNLEEAKRLAQEVKLMFELAELVYRLFELIQRLKELGDPELAEFLKKIIEEILRAIQTSQNGNLEEARKLAEEVKVQFLRAEIIYQEFES

SEQ ID NO: 2087 - protein, 240 aa, synthetic construct
  REGION 1..240: note = Synthetic
SQAERLLEQLVRINVEELIKKMRQAGVSIEEIVKEIFKTAVEDAKRVIEEFGMTEEQQEELIERAAKLVLEIIVREAVKEIIQRMRQAGVSIEEIVKEIFKTAVRLAKIIIEQFGMTEEQQEELIERAAKLVLEIIVREAVKEIIQRMRQAGVSIEEIVKEIFKTAVRLAKIIIEQFGMTEEQQEELIERAAKLVLEIIVREAVKEIIQRMRQAGVSEQEIREEIFKTELRLRRIIERQF

SEQ ID NO: 2088 - protein, 257 aa, synthetic construct
  REGION 1..257: note = Synthetic
DRIERIINEARFVIYEAEHILEELEYLGMDEELIEKLKELLEIALQLLIEAARQGDEETARIVLIIVQALLVILKASYILMRLKQLGMDEELIEKLKELLEIALQLLIEAARQGDEETARIVLIIVQALLVILKASYILMRLKQLGMDEELIEKLKELLEIALQLLIEAARQGDEETARIVLIIVQALLVILKASYILMRLKQLGMDEELIEKLKELLEIALQLLIEAARQGDERTAREVLLLVLELLIELLQLLES

SEQ ID NO: 2089 - protein, 260 aa, synthetic construct
  REGION 1..260: note = Synthetic
DEMEEILLEATLILQRVKKILKELTKENGWSEELEQFFELLRRLLKLLLEAALQGDPRLAQMVLILALALLILALVTLILVRLTKENGWSEELEQFFELLRRLLKLLLEAALQGDPRLAQMVLILALALLILALVTLILVRLTKENGWSEELEQFFELLRRLLKLLLEAALQGDPRLAQMVLILALALLILALVTLILVRLTKENGWSEELEQFFELLRRLLKLLLEAALQGDPRLAKKVLTRARVLLLLARLTLEEVRS

SEQ ID NO: 2090 - protein, 260 aa, synthetic construct
  REGION 1..260: note = Synthetic
DRLEFLLIQAHFVLLLVEAILQFLERINGWSEELEQFFELLRRLLKLLLEAALQGDPRLARMVLILALALLILALVTVILVLLELLIGWSEELEQFFELLRRLLKLLLEAALQGDPRLAEMVLILALALLILALVTHILVELEYENGWSEELEQFFELLRRLLKLLLEAALQGDPRLAYSVLILARALLVLALVTLILVRLTKENGWSEELEQFFELLRRLLKLLLEAALQGDPRLALEVLVQATRLLALAEQTLYHVRS

SEQ ID NO: 2091 - protein, 242 aa, synthetic construct
  REGION 1..242: note = Synthetic
SELEVKVRILLLIAEYFARLAREAGFDEEILQTLMELILQVLKKIKNAQSEEDAETVTSLATVLSYLAIAALFALLARHAGFDEEILQTLMELILQVLKKIKNAQSEEDARTVTLLATVLSYLAQAALYALRAREAGFDEEILQTLMELILQVLKKIKNAQSHRDAFLVVTLATVLSFLAQAALYALRAREAGFDEEILQTLMELILQVLKKIKNAQSSEDAIRVVSIAIELSLLAELALLH

SEQ ID NO: 2092 - protein, 254 aa, synthetic construct
  REGION 1..254: note = Synthetic
SQLLLEALILLDRAREFLMRLKQLGMDEEILQEIKEAIQIVLELLKEASRRGDPEKVRLAVLLAQALLLLVQALYFLMRLKQLGMDEEILQEIKEAIQIVLELLKEASRRGDPEKVRLAVLLAQALLLLVQALYFLMRLKQLGMDEEILQEIKEAIQIVLELLKEASRRGDPEKVRLAVLLAQALLLLVQALYFLMRLKQLGMDEEILQEIKEAIQIVLELLKEASRRGDPQLVRQAVYLALILLLYVRLLFDS

SEQ ID NO: 2093 - protein, 254 aa, synthetic construct
  REGION 1..254: note = Synthetic
DELLVEARLLLLEAEYILRLLKKLGMDEEILQEIKEAIQIVLELLKEASRRGDPEKVRLAVLLAQALLLLVQALYFLMRLKQLGMDEEILQEIKEAIQIVLELLKEASRRGDPEKVRLAVLLAQALLLLVQALYFLMRLKQLGMDEEILQEIKEAIQIVLELLKEASRRGDPEKVRLAVLLAQALLLLVQALYFLMRLKQLGMDEEILQEIKEAIQIVLELLKEASRRGDPRKVFEAVTLARELLVRVQHLYYS

SEQ ID NO: 2094 - protein, 254 aa, synthetic construct
  REGION 1..254: note = Synthetic
DELLFEALLLLVQAKKFLERLKQLGMDEEILQEIKEAIQIVLELLKEASRRGDPEKVRLAVLLAQALLLLVQALYFLMRLKQLGMDEEILQEIKEAIQIVLELLKEASRRGDPEKVRLAVLLAQALLLLVQALYFLMRLKQLGMDEEILQEIKEAIQIVLELLKEASRRGDPEKVRLAVLLAQALLLLVQALYFLMRLKQLGMDEEILQEIKEAIQIVLELLKEASRRGDPEKVHRAVLRARFLLEYVRYLFHH

SEQ ID NO: 2095 - protein, 254 aa, synthetic construct
  REGION 1..254: note = Synthetic
DELEEEARILLELAEFILRLLKRLGMDEEILQEIKEAIQIVLELLKEASRRGDPEKVRLAVLLAQALLLLVQALYFLMRLKQLGMDEEILQEIKEAIQIVLELLKEASRRGDPEKVRLAVLLAQALLLLVQALYFLMRLKQLGMDEEILQEIKEAIQIVLELLKEASRRGDPEKVYLAVLLALALLTLVQALYFLMRLKQLGMDEEILQEIKEAIQIVLELLKEASRRGDPEKVIRAVSLAVELLLYVQQLYRR

SEQ ID NO: 2096 - protein, 288 aa, synthetic construct
  REGION 1..288: note = Synthetic
DELERLLNLVRILAQTVRQLLRLILEFVQRHGMPEEWEQNIKELTEMLRTALESAFEALKRNDPELAKLALLLAQVVYYAASVLWLLLLILEFVQRHGMPEEWEQNIKELTEMLRTALESAFEALKRNDPELAKLALLLAQVVYYAASVLWLLLLILEFVQRHGMPEEWEQNIKELTEMLRTALESAFEALKRNDPELAKLALLLAQVVYYAASVLWLLLLILEFVQRHGMPEEWEQNIKELTEMLRTALESAFEALKRNDPRLALQAYVLAVFVFLQAKVLLLALRL

SEQ ID NO: 2097 - protein, 227 aa, synthetic construct
  REGION 1..227: note = Synthetic
DELEVEAKHLAIELLEQAERAAAKDPRQFELARQIVEKLLEMVERGDEEQIRKLSLLVKAILLAIELLEQAERAAAKDPRQFELARQIVEKLLEMVQRGDEEQIRKLSLLVKAILLAIELLEQAERAAAKDPRQFELARQIVEKLLEMVQRGDEEQIRKLSLLVKAILLAIELLEQAERAAAKDPRWFEVARLVVENLLESVQRGDEKQIRLFSELVELILRLIEQS

SEQ ID NO: 2098 - protein, 288 aa, synthetic construct
  REGION 1..288: note = Synthetic
SELERLLIEVEYLAQLVEVILKEILEFVQRHGMPEEWEQNIKELTEMLRTALESAFEALKRNDPELAKLALLLAQVVYYAASVLLLLLLILEFVQRHGMPEEWEQNIKELTEMLRTALESAFEALKRNDPELAKLALLLAQVVYYAASVLWLLLLILEFVQRHGMPEEWEQNIKELTEMLRTALESAFEALKRNDPKLARLALLLAQVVYYAASVLWLLLLILEFVQRHGMPEEWEQNIKELTEMLRTALESAFEALKRNDPRLALRALLLAQEVFLRARTLLELLRS

SEQ ID NO: 2099 - protein, 288 aa, synthetic construct
  REGION 1..288: note = Synthetic
DELEELLLLVRILAQLVRQLLRLILEFVQRHGMPEEWEQNIKELTEMLRTALESAFEALKRNDPELAKLALLLAQVVYYAASVLWLLLLILEFVQRHGMPEEWEQNIKELTEMLRTALESAFEALKRNDPELAKLALLLAQVVYYAASVLWLLLLILEFVQRHGMPEEWEQNIKELTEMLRTALESAFEALKRNDPRLAELALYLAQVVYFAASVLWLLLLILEFVQRHGMPEEWEQLIKELTEELRTALESAFEALKRNDPRLAIRAYVLALLVFLLAKYLWRELLS

SEQ ID NO: 2100 - protein, 288 aa, synthetic construct
  REGION 1..288: note = Synthetic
DKLEELYLEVLVLALRVRLTLELILEFVQRHGMPEEWEQNIKELTEMLRTALESAFEALKRNDPELAKLALLLAQVVSYAASVLRLLLKILEFVQRHGMPEEWEQNIKELTEMLRTALESAFEALKRNDPELAKLALLLAQVVYYAASVLWLLLLILEFVQRHGMPEEWEQNIKELTEMLRTALESAFEALKRNDPELAKLALLLAQVVYYAASVLWLLLLILEFVQRHGMPEEWEQNIKELTEMLRTALESAFEALKRNDPQLALEALQLAQRVYVNARNLLLHLES

SEQ ID NO: 2101 - protein, 288 aa, synthetic construct
  REGION 1..288: note = Synthetic
SELEELLLQVRVLALAVEVYLEFILEFVQRHGMPEEWEQNIKELTEMLRTALESAFEALKRNDPELAKLALLLAQVVYYAASVLFILLQILQFVQRHGMPEEWEQNIKELTEMLRTALESAFEALKRNDPKLAQLALLLAQVVYYAASVLLLLLKILEFVQRHGMPEEWEQNIKELTEMLRTALESAFEALKRNDPRLAFLALLLAIVVYLAASVLWLLLLILEFVQRHGMPEEWEQNIKELTELLRTALESAFEALKRNDPELALKAVALAYHVFFHAEFLLLELQS

SEQ ID NO: 2102 - protein, 288 aa, synthetic construct
  REGION 1..288: note = Synthetic
SELNELLLEVYFLARAVETILEEILEFVQRHGMPEEWEQNIKELTEMLRTALESAFEALKRNDPELAKLALLLAQVVFYAALVLLLLLLILEFVQRHGMPEEWEQNIKELTEMLRTALESAFEALKRNDPELAKLALLLAQVVYYAASVLWLLLLILEFVQRHGMPEEWEQNIKELTEMLRTALESAFEALKRNDPRLAKLALLLAQVVYYAASVLWLLLLILEFVQRHGMPEEWEQNIKELTEMLRTALESAFEALKRNDPHLALEAYFLALRVYIEARILWEELLS

SEQ ID NO: 2103 - protein, 288 aa, synthetic construct
  REGION 1..288: note = Synthetic
DRLEELLRQVQHYALLVRVLLEQILEFVQRHGMPEEWEQNIKELTEMLRTALESAFEALKRNDPELAKLALLLAQVVYYAASVLYLLLLILEFVQRFGMPEEWEQNIKELTEMLRTALESAFEALKRNDPELAELALLLAQVVYYAASVLWLLLQILEFVQRHGMPEEWEQNIKELTEMLRTALESAFEALKRNDPKLALLAYLLALVVYYAASVLWLLLLILEFVQRHGMPEEWEQNIKELTEMLRTALESAFEALKRNDPRLALEAYELALRVYVDARSLWLELRL

SEQ ID NO: 2104 - protein, 289 aa, synthetic construct
  REGION 1..289: note = Synthetic
DELEKIALRVYVHIYQVQLILEKLLEFMKRHGYPEELKQTIEEILQVIREALQQVYEALERGDPKTAELALIAASVALFIALVSLILLELLEFMKRHGYPEELKQTIEEILQVIREALQQVYEALERGDPKTARLALIAASVALFIALVSLILLRLLEFMKRHGYPEELKQTIEEILQVIREALQQVYEALERGDPHTALLALIAASVALFIALVSLILLRLLEFMKRHGYPEELKQDIEEILQTIREALQQVYEALERGDPHTASRALTLAFHALTEAELSLFKLELS

SEQ ID NO: 2105 - protein, 289 aa, synthetic construct
  REGION 1..289: note = Synthetic
DELEKIARSVRKFILQVELILKLLLEDMKRHGYPEELKQTIEEILQVIREALQQVYEALERGDPKTAELALIAASVALFIALVSLILLELLEFMKRFGYPEELKQTIEEILQVIREALQQVYEALERGDPKTAELALIAASVALFIALVSLILLELLEFMKRHGYPEELKQTIEEILQVIREALQQVYEALERGDPKTARLALLAARVALFIALVSLILLRLLEFMKRHGYPEELKQTIEEILQVIREALQQVYEALERGDPETAQEALHLALRALTLAKESLSRLEQS

SEQ ID NO: 2106 - protein, 301 aa, synthetic construct
  REGION 1..301: note = Synthetic
LVEMAELLEEAVRLLQRIEDLIELFLRRAKQTGDEEEFRKAKENIEQLLRVAQEALRIILEALRMGDPELVEMAYLLLQAVLLLAKILLLILEFLEQAKKTGDEEEFRKAKENIEQLLRVAQEALRIILEALRMGDPELVEMAYLLLQAVLLLAKILLLILEFLRQAKQTGDEEEFRKAKENIEQLLRVAQEALRIILEALRMGDPELVEMAYLLLQAVLLLAKILLLILEFLRQAKQTGDEEEFRKAKENIEQLLRVAQEALRIILEALRMGDPKLVKQAYALLLHVLSLALELLVRLIS

SEQ ID NO: 2107 - protein, 301 aa, synthetic construct
  REGION 1..301: note = Synthetic
LEEMEFLLKEAELLLELIEVLIRQFLRQAKQTGDEEEFRKAKENIEQLLRVAQEALRIILEALRMGDPELVEMAYLLLQAVLLLAKILLLILEFLRQAKQTGDEEEFRKAKENIEQLLRVAQEALRIILEALRMGDPELVEMAYLLLQAVLLLAKILLLILEFLRQAKQTGDEEEFRKAKENIEQLLRVAQEALRIILEALRMGDPELVEMAYLLLQAVLLLAKILLLILEFLRQAKQTGDEEEFRKAKENIEQLLRVAQEALRIILEALRMGDPSLVFHAYVLLLRVLSLAIHLHQRLRS

SEQ ID NO: 2108 - protein, 227 aa, synthetic construct
  REGION 1..227: note = Synthetic
DELLLEALELAIRLKRQAERAAAKDPRQFELARQIVEKLEEMIRRGDEEQIRKLSLLVKAILLAIELLEQAERAAAKDPRQFELARQIVEKLLEMVQRGDEEQIRKLSLLVKAILLAIELLEQAERAAAKDPRQFELARQIVEKLLEMVQRGDEEQIRKLSLLVKAILLAIELLEQAERAAAKDPFLFELARQIVELLLEAVQRGDETRIRVLSDLVETILRHIEKS

SEQ ID NO: 2109 - protein, 235 aa, synthetic construct
  REGION 1..235: note = Synthetic
RREIIYEALQIVLQVKLLAEQLSRKDEEKARQMFETAQELAERVEKSTDEEELKRLLIILQAIYLVLKVLKLAEELSRKDEEKARQMFETAQELAERVQKSTDEEELKRLLIILQAIYLVLKVLKLAEELSRKDEEKARQMFETAQELAERVQKSTDEEELKRLLIILQAIYLVLKVLKLAEELSRKDEEKARQMFETAQELAERVQKSTDEKELRLLLLQLRILLTQLHVLLLR

SEQ ID NO: 2110 - protein, 221 aa, synthetic construct
  REGION 1..221: note = Synthetic
SEDEIARALHLIAEVMATAKELGDSDALKLADKLWKAIAEALKKGDMERVQRLYEIFRALKLILEVLKLARELGDSRALELAKRLLKAIIEAADKGDMELVQRIYEILRALKLILEVKKIARELGDSKALELAKRLLDEIFEAYEKGDMERVERIYRILTALKQILLVYKLALELGDSRALEEAKRLLEAIFEAYEKGDSKRVAELLLRIIFLQAELKKRK

SEQ ID NO: 2111 - protein, 221 aa, synthetic construct
  REGION 1..221: note = Synthetic
TETLIHLAKSLIKQVYKTAAKLGDSKALALARKLAEAIKEAEKKGDMERVRRLLKIILALLDILAVYETAAELGDSDALELARRLLDAIAEAADKGDMEAVKRILEILRALKAILEVIKIAEELGDSRALELAKRLLKEILEAYEKGDMERVKRLLEILRALKSILKVYKIALELGDSEALEAAKRHLEMIIKAAEAGDMELVEILYKSIESLIEQLEKRK

SEQ ID NO: 2112 - protein, 248 aa, synthetic construct
  REGION 1..248: note = Synthetic
SSELKKAALRALFLIASVKIAAKDTGNEWALKVAARMEELVEEALRLKDVDEEKAKERIALVVAILEAIWLILAVLHAARETGNEEAKEIAKRMVELVEKAEKLFDVDRDKAKEIIATVKQILEAILLILQVLKAARETGNEEAHKIAERMLELVEEAFALRDVDKDRAQKIIAWVKAILYAILLILQVLKLARETGNEEAHEAAERMLEAVKEAEKKADVDEHKAWKTILTIAAWLTNLLKKLEEEK

SEQ ID NO: 2113 - protein, 223 aa, synthetic construct
  REGION 1..223: note = Synthetic
STESAALFLKILELILEALEKAKQAGNEEAKRMVEDLNRAVEEAARAGDSETLKLAELIIKIILLIVEALERAKKAGNEEAKEMIEQLIETVKRAKDAGDKETLKFAETIIKLIILIIEALKRAKEAGNEEVEKMVRELIKDLKRAKEAGDKRTLHLLFLIIRLIIAIIQALKEAEAAGNEQAKREVEELIKQVKRAKDAGDESTLWKLLLTISQILLKVAEK

SEQ ID NO: 2114 - protein, 223 aa, synthetic construct
  REGION 1..223: note = Synthetic
SEELKFLIKLLELAIKSAKEKAAQAGNEEAKKMVEELARDLEEAKRAGDKETLKFLWAIIKLIQAIIEALERAKKAGNEEAKKMVKELIEALARAKKAGDSETLAFLETIIKLIILIIEALKRAKEAGNEDAEKMIRELIKDLKRAKDAGDKETLKLLLLIIKLIILIIIALEEAEKKGNEDVKTLVKMLIKMVAKAKKAGDKETLKFAIEVIEQIIKTVRST

SEQ ID NO: 2115 - protein, 223 aa, synthetic construct
  REGION 1..223: note = Synthetic
TEELKFLILLINMAIKSALELAKKAGNEEAKEMVEDLQRLVEEAARAGDKETLKFAWKIILLIQLIIEALERAKKAGNEEAKEMVKQLIKALKRAKDAGDKETLEFLFTIIKLIILIIEALKRAKEAGNEEAEKMVRELIKDLKRAIEAGDKETLKLLLLIIKLIILIVQALDEAKKAGNEDAKEFVTMLIKMVKKAKEAGDKETLKHALEAIKQIIKSIKQT

SEQ ID NO: 2116 - protein, 271 aa, synthetic construct
  REGION 1..271: note = Synthetic
SEEEEKTAEKLLEFFKLALALIKKALESQGDEEQWKLLKELWDTVLKLLERAKKTGDPRLLEKAMRILKLLLKLLQITANWLAIKEALKELGDEEQLEKFKQLWEAVLELLKQAAETGDPRLEEKADRILEALLLLYAFLLLLIEIKKLLKARGDEEQFQKLRKLWETVLELLRQAQETGDPRLLEWALRILKALLLLLRVLKLLIEIKELLEEKGDESIFKWLRKKWETVLELLLQAAETGDPRLLEEALRLLRQLLRLLWLTKLLIAAT

SEQ ID NO: 2117 - protein, 271 aa, synthetic construct
  REGION 1..271: note = Synthetic
TEEEEKKAEEALTAIKLLLALIKKALKAAGDEEQFKTLKELWETVQRLLERAKRTGDPRLLEQAMRILKLLNALLRVTALFLAIKKALEELGDEETYEKLKQLWETVLELLKQARETGDPRLLEKALRLLEALELLLKVLLLLIELKKLLEELGDEETYQKFRELWETLLELLKQAQETGDPRLLATALRILKALLLLLKVLKLLIEIKKLLEEQGDESVEKLLAKQWETVLELLKQAAETGDPRLFETALRILRNLLEQLELILLLIKAK

SEQ ID NO: 2118 - protein, 202 aa, synthetic construct
  REGION 1..202: note = Synthetic
SHYLRLLVHFALSALKEAIDLAKKLGDETSLKLFERLLEELKKMAETGVDERKIKLLIKVAKALLSLLRAIKRAKELGDEESLRLFRQLLKQLAEMALKGVDARDIELLVRVAEALLALLKAIKKAAELGDEESLQLFRELLKRLAEMARKGVDATDIKLLVFVAEALLEHLEAIERAEKEGDEEKLKKLRESLKKAAKKAR

SEQ ID NO: 2119 - protein, 235 aa, synthetic construct
  REGION 1..235: note = Synthetic
SLEAFHRVLAALVELLLQMKEVKEDGDEDLLKLLREAFERLKQALKEGDPQKLREALEWAKVASALFELKKQMKEVKEAGDERLLQLLRKAYELLEKALKEGDPQKLREALAWASVASLLFELKQQMKEVKEAGDERLLQLLREAFELLEKALEEGDPSKLAYAALWANVASLLFELLQQLSEVKKAGDEELLQLLRKAFEALEKALEEGDPRKLWEALLAAYLASAEFEKKKRK

SEQ ID NO: 2120 - protein, 253 aa, synthetic construct
  REGION 1..253: note = Synthetic
RESQFKFAATFAQFAVELAAEAADRAGNPALKELVELIQKFLAEAEDTFKKGDFEKAQKLLEDAVKAAFAIAAVVTAFQIAKEAGNPDLQELVETILRLLKKALETFFKGDESKAKKLLDFAYQAARAIALVVQAYQIAKEAGNPQLLELVKQILRLLKKALETFEQGDYEKAQKLLEFAYQAAEAILLVVRAFQIAKEAGNPKLRTLVALIVEQLKAALETFEQGDYEKAQKLLESAYKAARTILELVKHAQ

SEQ ID NO: 2121 - protein, 257 aa, synthetic construct
  REGION 1..257: note = Synthetic
SEQELRNLMAFAEMAAKMLLKIAAELGDEDALRQAQRILEKIEQVIREAQNSKDFERIAKELELLLLMVQAAVYALRLLKVAKEMGDEETYKWAKEILEKIAEVIKRAEKSKDAERIKKELELLLLMVQAATHALELLKVAKELGDEDFYRWAKEIFEQIARVIKRAENSKDAERIKSELELLLLMVQAATLAVELLKIAKEMGDETLYKFAKSQLKEISKVIARAENSKDDEQIKRELKKLYETVRTAVEMAKTYK

SEQ ID NO: 2122 - protein, 257 aa, synthetic construct
  REGION 1..257: note = Synthetic
SETKLHELMHRALHYAYKLLQIAAEMGDEESYRQALRILKKIEEVVKRAIDSKDYERIAKELELLLLMVQAATHAVELLKIAKELGDEELYRTAKEIFEKIAKVIKRAENSKDFERIKKELTLLLLMVQAATAAVALLKFAKELGDEQFWREAKEIWEAISRAIKRAENSKDFERIYKELLLLLSMVAAATAAIELLKIAYEMGDEDSIREAKKILAKIAEVIRRAENSKDYEAIQTELSKLLFRVQKATYKLKHKK

SEQ ID NO: 2123 - protein, 257 aa, synthetic construct
  REGION 1..257: note = Synthetic
SELELAQLMVAALLAAKTLLKIAAELGDEELYRQAQRILERIEQAVREAKNSKDFERIEKELELLLLMVLAALYALELLKIAKELGDEELYRWAKEILEKIWEVIKRAEKSKDAERIKKELELLLLMVQAATAAVALLAIAKKLGDEDAYRFAKKIFAEIARVIARAENSKDYERIKAELHLLLLMVQAATLALRLLALAKKMGDEDAYREAKKIWQKIVEVIERAENSKDEIKILLTLTELLERVAQATEKLLKKA

SEQ ID NO: 2124 - protein, 229 aa, synthetic construct
  REGION 1..229: note = Synthetic
SEEQKKLLQAAASALILIAMAIKYAEEMGDEELSRLLKEIAELIRKVAKALYDRGDEELRKQLELLLLAAQALLLILQAIKYAKEMGDEEVAELLREIAFLIVKVAKAATETGDEKLREQLELLLRAAKALLLILQAIKIAKEMGDEKLFELLRQIAKLIVEIARAATERGDEEAKEQLQLLLEAAERLLHQLKAIAAAEKMGDKELSTKLRESAIEIVERAKRATKTG

SEQ ID NO: 2125 - protein, 226 aa, synthetic construct
  REGION 1..226: note = Synthetic
SEEELRFALAVWAAVVALEHALEIARKNGDERLARAIEKAIKQAKRLLERYKKSTDPELEAQLKFLLQVAEAVQLLAQALEIAKKNGDEELSRMIAEAILRALKLLERYFKSTDPELQQQLEFLLAVAKAVLLLAKALEIAKKNGDEELARMIAEAIKRALRLLQEYERSTDPRLEEQLEILALVAWAVLNLAKKLEEAKANGDEEKSRQIRERIRTALKMLAKAE

SEQ ID NO: 2126 - protein, 258 aa, synthetic construct
  REGION 1..258: note = Synthetic
SIEIALMRLTLSHLVEEIQEYAKAAKEMGDERAFEQMERLVAYAKALLAEAQRSTDPRQIAILTLLAELLSLVVQILYYVTLAAAMGDESAFEKMRELVEFAQELLEEALRSTDPEQIKYLTLLARLLSLIVEILYYATQAKAMGDEDAFRKMEEFLAKAEELFEEALRSTDPEQIKILTLLARLLSLWVQILYYATQAKAMGDEEAYKKMEHQLKAAATLIELALNSTDPRQIEKATRFAEDLSAKVRETALKSKVK

SEQ ID NO: 2127 - protein, 258 aa, synthetic construct
  REGION 1..258: note = Synthetic
SIEIALMLATLKQLVEEIQDLARAAAAMGDERAFEWMERLVQKAKELLEEALRSTDPRQIAILTLLAELFSLVVQILYYATQAAKMGDSEAFEKMRELFEKAQELLEEALRSTDPEQIKILTLLARLFSLVVQILYYAAQARAMGDEDAARKMEELLAKAEELLEEALRSTDPRQIKILTLLARLLSLVVQILYYATEAAAMGDEEAFKKMEEYFKIAETLLELALNSTDPRQIEKATRFAEWLSAWVRELAMKAKVK

SEQ ID NO: 2128 - protein, 229 aa, synthetic construct
  REGION 1..229: note = Synthetic
SEEYLKLVLKLIEVVIKNIESALERAKRDGDERLLDTMLKLLERAKRLYEKVKRATDPRKVELLLVLVQILWYIIQILQSLAEAEKQGDERLLKKMKKLLEQAFELFEKVARATDPRKVELLLVLVQILWYIIKILLSLYEAEAQGDEDLLEKMKALAERAFRLFEAVARATDPRKVQKLLKLVQILAEIIDILKKLYEAKKKGDEEAARDLKTNAEYAFTLFKLTAKK

SEQ ID NO: 2129 - protein, 229 aa, synthetic construct
  REGION 1..229: note = Synthetic
SEDELKEVLLRIYWYISFIEAAAARAKAAGDERLLKKMKALAERAKRLYEAVKRATDPQKVRTLLVLVQILYYIILILQSLHEAEARGDERLHKKMKKIAEQAFELFEKVARATDPSKVELLLVLVQILYYIILILLSVHEAENAGDEELAKKMKEIAERAERLFEQVQRATDPSEVRKLLLLVQILWTIIKILKKLHKARADGDEKKLDVLKKLLESIRKLFEEVARA

SEQ ID NO: 2130 - protein, 255 aa, synthetic construct
  REGION 1..255: note = Synthetic
DETIKENLEAIKALAHVAAFYLKLFAEMGDESSYQAVREFLEQIKRLFEEARRSTTEEQVRIALNLARIAILYIRAMYALKLFADMGDERSYQEVRKFLEQIRRLFEEAARSTTEEQVKLALNLAQIAWLYIAAMLALAKFEKMGDEESYQQVRKFLEQIARLFEEARRSTTEEQVKIALNLARIAWLYIDAMLALAKFEAMGDEEAYQAVRKALEAIARLFEEARRSTTEEQVSSALTQAKLAWEYIKTMEELS

SEQ ID NO: 2131 - protein, 253 aa, synthetic construct
  REGION 1..253: note = Synthetic
SEEQFKFAATFAQFAVELAKEAAERAGNPALLELVDLIQEFLEEAKRTFDKGDFEKAQKLLEFAVKAAFALAAVVKAFQIAKEAGNPALLELVELIVRLLKKALETLKRGDEEKATKLLEFAYQAAKAIALVVAAHQIAKEAGNPQLRELVEQILRLLKKALETFAQGDYEKAQKLLEFAIQAAEAILLVVRAFQIAKEAGNPKLRTLVHLILEQLKKALETFEQGDYEAAQRKLESAYKAARTILELVKDAQ

SEQ ID NO: 2132 - protein, 259 aa, synthetic construct
  REGION 1..259: note = Synthetic
DEEKILTAAIEILEAILKAYEFAKRAEEAGDKDFLAEMKKLAEKIKRLAEEVKRATSEEQVKIALALVRIALAILEALLFLLEAKKRGDEEFLTEMKKLVEKIKRLFEAVARATSELQVDIAEALVEIALAILRALKFIAEAKEAGDEEFLRQMKDLLEKIKRLFEAVARATSELQVKIALALVRIALAILKALKFILEAKEAGDEEFLKQMKKLLEKIKRLFEAVARATSEEQVTYAHQAVRLALLYLELLAQERDEK

SEQ ID NO: 2133 - protein, 259 aa, synthetic construct
  REGION 1..259: note = Synthetic
SEIEALKALYEILKASEKAFKFVKRAEEAGDEEFLREMRKLLEKIHKLAEQVAKATSEEQVEIALALVRIALAILEALQLLLEAKKAGDEEFIKEMKKLVEKIKRLFEKVARATSEEQVTIALALVEIALAILRALKFIREAKEAGDEEFLREMKKLLETIKRLFEAVERATSKEQVKIALALVRIALAILEALKFIKEAKEAGDEEFLRKMKKLVEKIKRLFEAVARATSDEQLTKALIAVAVALAAFAQLKLEQEAK

SEQ ID NO: 2134 - protein, 259 aa, synthetic construct
  REGION 1..259: note = Synthetic
EEQEIKSAALEIEAAIYAAKAFATRAEKKGDKEFADEMKKLVETIERLFEAVKRATSEEQVKIALALVRIALAIFKALQFIAEAKEAGDEEFLKEMKKLVEKIKRLFEKVARATSELQVRIAEALVEIALAILEILKFIREAKERGDEEYARQMKKLLEKIKRLFEAVERATSERQVEIALALVRIALAILRALKFIAEAKDRGDEEFIKFMKEILKYIKWLFEAVARATSEEQVEEALRAVERALALLETMQKVLKTK

SEQ ID NO: 2135 - protein, 259 aa, synthetic construct
  REGION 1..259: note = Synthetic
SEEEKKTAALQIHSALLAAKAFATRAKKKGDEEFAREMKKLVETIERLLEAVKRATSELQVKIALALVRIALAIFEALQFIAEAKEAGDEEFLKEMKKLVETIKRLFEKVARATSELQLKIALALVEIALAILQVLKFLREAKEAGDEEFLKQMKDLLEKIKRLFEAVERATSERQVKIALALVRILLAILQALAFIKEAKEAGDEEAIRAMKKIVEFIKRLFEKVARATSEEQVDEALRKVKEALKMLALYQKVRKTK

SEQ ID NO: 2136 - protein, 259 aa, synthetic construct
  REGION 1..259: note = Synthetic
SEQEIKSALLQIEAAIYKAKAFATRAKKEGDEEFAREMKKLVETIERLFEAVERATSELQVKIALALVRIALAIFEALQFILEAKRAGDEEFLKEMKKLLEKIKRLFEAVARATSELQLKIALALVEIALAIFYALKLFREAKEKGDSEFLAQMKKLLETIKRLFEAVERATSERQVEIALALVRIALAILAALKFILEAKERGDEEFIKFMKKILEYIKWLFEAVARATSEEQVKEALRQVAEALKMLKTMQKVAKTK

SEQ ID NO: 2137 - protein, 259 aa, synthetic construct
  REGION 1..259: note = Synthetic
SEEEKETALSAIESAYFAALAFATRAKKAGDEEFLREMKKLVEKIERLFEAVERATSELQVKIALALVRIALAILKALQLILEAKKKGDSEFLTEMKKLLEKIKRLFEKVERATSEEQLKIALALVEIALAILKALKFIAEAKEAGDEEFATEMKKLVEEIKRLFEAVERATSERQVKIALALVRIALAILEALKLILEAKERGDKEFIRVMKEILKYIKKLYEAVKRATSEEQVDKALAKVEHAKKQLKTMAKVAKTK

SEQ ID NO: 2138 - protein, 259 aa, synthetic construct
  REGION 1..259: note = Synthetic
SEDEIEEAALEILSAIFAAKAFATRAKKKGDEEFAEEMRKLVETIERLFEEVKRATSELQVTIALALVRIALAIFEALQFIAEAKEAGDSEFLTEMKKLLEKIKRLFEAVARATSELQVKIAEALVEIALAILQALKLFREAKETGDEEFLREMKKLLETIKRLFEAVERATSELQVDIALALVRIALAILQALKFILEAKKRGDEEFIKTMKKNLEFIKKLFEAVARATSEEQVATALRKVEAALKSLKTMQKVAKTK

SEQ ID NO: 2139 - protein, 259 aa, synthetic construct
  REGION 1..259: note = Synthetic
SEKEIWRALSEIEMALMLAKAAATRAEKAGDEEFAREMKKLVETIARLYEAVARATSEEQVKIALALVRIALAILWVLQLILEAKEAGDEEFLKEMKKLLEKIKRLFEAVARATSEEQLKIALALVEILLAILAALKFIREAKEKGDEEFLKQMKKLLEKIKRLFEAVERATSKLQVEIALALVRIALAILKALKFIAEAKEAGDEEFLKFMQNILKQIKELYEEVARATSEEQVKKALDWVKKLLAMLELAQKVAKTK

SEQ ID NO: 2140 - protein, 255 aa, synthetic construct
  REGION 1..255: note = Synthetic
SEEASRVQLRISEIYLEVLAVLFEMKKAGDERAYKRIEKILRRIKEILERAAQSTDPAELRALYVVAEIAQIYIAVLQTQHEMERAGDERALKRIEKILQKIEEILERAKQSTDPAELEALYVFAQIAQIYIEILKVQHEMERAGDERALRRIEKILKKIEEILERAKQSTDPTELFALWVFAKIAQIYIRVLKVQHEMERAGDEEALRKIQEILKAIEEILEKAKQSTDPSELNKLYNKALELELAIKILQTAH

SEQ ID NO: 2141 - protein, 255 aa, synthetic construct
  REGION 1..255: note = Synthetic
SEEAMSVYQFIVSIYLKVLLLLFEMAKAGDERAYRRIEKVLKRIKEIIERAAQSTDPAELRALYVFAEIAQIYIEILKVQHEMERAGDERALRRIEKILQKIAEILERAKQSTDPSELYALWVFAQIAQIYIEILKTQHEMEAAGDERALRRIEKILQKIEEILERAKQSTDPTELYALYVFAKIAQIYIRVLKVQHEMERRGDEEALRKIQKILKAIEEILEKAKQSTDPSELLKLSEKASKLEVEIKMLQTAH

SEQ ID NO: 2142 - protein, 253 aa, synthetic construct
  REGION 1..253: note = Synthetic
RESQFKQQATFAQFAVELAHEAAKRAGNPKLLELVDKIQKFLEEAKRTFDKGDFEKAQALLEFAAQAAHAIRAVVKAFQIAKEAGNPALQELVELILDLLKEALETFENGDEEKAYKLLAFAYQAAKAIALVVQAFQIAKEAGNPDLLELVEQILRLLKKALETFFKGDYEKAQKLLEFAIQAAEAILLVVRAFQLAKEAGNPKLRTLVKIIVKQLKAALETFEQGDYEKAQKLLETALKLAKTILELVKDAQ

SEQ ID NO: 2143 - protein, 255 aa, synthetic construct
  REGION 1..255: note = Synthetic
SEEAAKVLAYISRILAAVLRFQAEMKKAGDERAVRRIEKVLKAILEIARRARQSTDPAELRALYVFAFIAQIYIAVLAVQHEMERAGDETALRRIEKILKKIAEILERAKQSTDPAELEALYVFAQIAQIYIEILKVQHEMARAGDERALRRIETILDKIEKILERAKQSTDPAELFALWVFAKIAQIYIKVLQFYHEMEAAGDEDALRKIEETLKRIAEILEKAAHSTDPSELTKLYITALFLQAEISLLALEK

SEQ ID NO: 2144 - protein, 263 aa, synthetic construct
  REGION 1..263: note = Synthetic
SSKEYLELVEYANRILLKILKILKKAEEYGDEQILREAEELLRRVKEMLRQFKKHASDPSIVEKLKRFLKALEILLKILEIILRAREAGDEEILRQAWELLERVKEMLQQFLEHASDPEVKEKLERTLKALEILLKILEIILRARKAGDEEILRQAYALLEEVREMLQRFLEHASDPRIKEKLESVLQALEILLKILEIILKAREAGDEEVTRKAQELLERVREMLQRFKEHASDPQIKEELHRFLLELFQKVLNLELKLIAR

SEQ ID NO: 2145 - protein, 263 aa, synthetic construct
  REGION 1..263: note = Synthetic
SESEYLKTMEQAFRISFKIQKIIKEAKAAGDEQIVREAEELQRRVTEMLKQFSKHASDPTISEKLRRTLKALEILLKILEIILRARRAGDEEITRQAKELLERVKEMLQKFLEHASDPEISEKLERTLKALEILLKILEIILRAREAGDEEILRQAEALLEKVREMLQRFLENASDPEIKRKLETTLTALELLVKILEIILKARKAGDEEVTRKAQELLERVREMLERFEEHASDPQIVKELKKTLLKLFEKVLALLLKLTHR

SEQ ID NO: 2146 - protein, 263 aa, synthetic construct
  REGION 1..263: note = Synthetic
SSKEFLATMEQAFRILLKILKILKEAKEAGDEEITREAEELLRRVKEMLKAFSKHASDPRIVEKLKRTLKALEILVKILEIILRAREAGDEEITRFAKELLERVKEMLQRFKENASDPRIKEKLERTLTALEILLDILEIILRAREAGDEDITRFAQELLEEVREMLQRFKEHASDPEISTKLHQTLQALKLLVKILKIILEARKAGDEEITKKAKELLERVREMLQRFKENASDPQIVKELQKTLLKLFEKVLTLKLKLIAR

SEQ ID NO: 2147 - protein, 258 aa, synthetic construct
  REGION 1..258: note = Synthetic
TNEYLKLLLALLEALAALKEALELAKKEGDEELLELLEQVYEALRELKEETERKGVDERTYKELALMIELALALVALVEALKKAKEEGDEELLTLLQQVWEALKRLFEETRRKGVDDDTYKKLALMIQLAEALVALVDALKKAKEEGDEELLELLLQVWEALKRLFEETERRGVDEDTYRELALMIWLAKALVKLLDALKKAKEEGDSSLLEELERVWQQLKRLFEETERKGVDEDTFLTLLTMIAYALHLVANAEKK

SEQ ID NO: 2148 - protein, 262 aa, synthetic construct
  REGION 1..262: note = Synthetic
SEEEKEMARALEEAWRFLFNASVLALLLGDEQLWKAVLELLKEIDKIQKELEKTGDKERAEEQIRMVVLLAKAIYFLAAAFYWAKLAGDEELLRAVQEIVRAVIEILRELKKTGDKERAAQQLRMVLKLAKAIYFLAWAFFVAAKLGDEELLRAVQKLLAEALEILREFEETGDKERAETLIAMVLLLAKAIAMLIAAFLNAKKAGDEDLQKAVQKLLKAALEILEEYKKTGDKDKATEQLKEVLRKAETIAKEALKAAAKK

SEQ ID NO: 2149 - protein, 229 aa, synthetic construct
  REGION 1..229: note = Synthetic
SKEETTLLLKLVQILYNATELLKRAKEAGDERIYKQARKVAETAKELLEEIKKLKITPEQYLQIELLIQLLEIVVKALKLLLRAKEHGDESIFQQARKVMEEARRLLEEIKKLKITPEQFRKIQLLIQLLEIVVKALALLLEAKAAGDEEIYQKARKVMETARKLLEEIRKLKITPEQFKKIQYLIEALELVLHALEQLLRAKKSGDETLYKLALEFMKMAEKALEEAR

SEQ ID NO: 2150 - protein, 229 aa, synthetic construct
  REGION 1..229: note = Synthetic
SEEQEELAEKLQRIVARAFELLLRAKAAGDESIADQARKVAEFALELLEEIKRLKITPDEFTKIALLIQLLEIVVKALELLLRAKEAGDESIYQQARAVMEEARRLLEEIKKLKITPEQKRVIQLLIQLLEIVVKALELLLEAARAGDEEIYQKARKVMETARKLLEEIRKLKITPEQYKKIQKLIELLENVVLALKLLLLAKKLGDEEFYQRARESLEKAERALEEIR

SEQ ID NO: 2151 - protein, 252 aa, synthetic construct
  REGION 1..252: note = Synthetic
EEELRAKIMTAKTLVEMAKEHAKRAGQEEAKTILKQLERQIEEIEERWKKSRDPRLERELEFLIAIAEAVLLVLQAFLLAKKAGQEEAKKIVEKLLKQILEILEKWEKSRDPKLEDELKFLIKIARAVMLVLQAFLLAKEAGQEEAKEIVEELLKQILRILEKWEKSRDPELEEELDFLLKIAEAVATVLEAYQLAKEAGQEEAQRRVEELLRAIKEILEKWEKSRDPELVATLYALILTARAVATLLKSAK

SEQ ID NO: 2152 - protein, 194 aa, synthetic construct
  REGION 1..194: note = Synthetic
TEEIHKFAAEILKKALEALKRSTNPADKKTIKALLDIAQLFLKVAKVLQRAEEEGDEQISKIAEQAYRILLKAYELLERSTNPRTLKTIEALIRIAAMLLAVADVLLEARQEGDEEIAKIAEEAYRILEEAQRQLEKSTNPETLRKIEELIEIAKRLLEVAQHLLEAKQEGDELHLKIAKIMYEILELFQRDAE

SEQ ID NO: 2153 - protein, 253 aa, synthetic construct
  REGION 1..253: note = Synthetic
REEEFKFLATFAQFAVELAREAAKRAGNPDLLELVELIQKLLEKAERTFNKGDFEKAQKLLEYAAKAAYAIAAVVQAFEDAKKLGNPSLEELLKLILELLKKALETFDKGDTEKAAKLLEFAYQAASAIALVVEAFKIAKKAGNPELEELLEQILRLLKKALETFEQGDKEKAQKLLEFAYQAAEAILLVVRAYQTAKEAGNPKLRTLVALIVKALKKALETFEQGDYEKAQKLLEKAYKAAATLLHLVKHAQ

SEQ ID NO: 2154 - protein, 194 aa, synthetic construct
  REGION 1..194: note = Synthetic
TEEILKFAAEILKKAVEASKRSTNPEAKKTLEALFTIALLLLKVADVLQKAEEEGDEQISKIAEQAYRILLKAYELLERSTNPEVLKTIELLIRIAAMLLLVAEVLLRARQEGDEEIARIAEEAYRILEEAQRQLERSTNPETLRQIEELIAIAQRLLEVAQTLLEAKQKGDETLVKIAKTMYKFLESQQKDAE

SEQ ID NO: 2155 - protein, 262 aa, synthetic construct
  REGION 1..262: note = Synthetic
STEQTLLLIAITIAKTLAKLLEKLAKQLGDEEALQIARKIKEELKRIEELTRRGKDLEEVKKRLELILEIVEALALAMKLLKLAAELGDSRALERAKEILQTLERIWELTKRGKDAEEVKKQLELWLKIVRALYLAMQLLKLAHELGDEEALKLAKAILEQLDRIFELTKRGKDAEEVKKQLELILEIVRALYLAMQLLKLAKELGDEEALQTAKRILEALARIFELTLRGKDKEDVDELLKLILKQVELAYELMAEKKREK

SEQ ID NO: 2156 - protein, 262 aa, synthetic construct
  REGION 1..262: note = Synthetic
SEELTKDLTKIMHASLIASRLAQLATELGDEEALQRARAILEELKRIEELTRRGKDAEEVKKQLDLILEIVRALYLAMQLLKLAAELGDERALKIAKQILKQLERIREATAKGKDKEEVKKQLELLLKIVRALYLAMQLLKLAYELGDEWALAFAKRILEFLQRIRELTKKGKDEEEVKKLLELILEIVRAFYLAMLLLKLAYELGDEDALQRAKRILEALQRIWELTLRGKDLEDVKRELREIVLKVAQAAIEMELEKTRR

SEQ ID NO: 2157 - protein, 262 aa, synthetic construct
  REGION 1..262: note = Synthetic
SDEFVELVKKIAHAAALAWKLLEIAAKLGDEEALQIARELWEELARIWELTKRGKDLEEVKKWLELFLEIVRALYKAMQLLELAKELGDSRALEIAKQILKFLARILELTKRGKDAEEVKKQLELILKILKAFYLAMQLLKLAYELGDEDALAIAKRILEQLQRIRELTEKGKDYEEVAELLELILMIVRALYLAMQLLKLAKDLGDEDALQEAKRILEELQRILELLQRGKDKESIKEKLVELLYEVMNRAAAMKAEARKQ

SEQ ID NO: 2158 - protein, 257 aa, synthetic construct
  REGION 1..257: note = Synthetic
SEEELTDLWYELLLAVLKAKAAANKATLLAAETGDPRAEELAKNLEKVVRLLEETMEQAERANSEEDLEIAEIIALLAKAVVDAIEAAIKASRLYAETGDPRAAELFANLEKVVQLLLELMEKAKRANSEEDLEIARVIATLAKAVVEAIKAAIDALRLYAETGDPRANELFAQLKKVVEQLLRTMKRAKDANSERDLKIARKIAKAALLVVAAIEQAIAAVKTLATTGDPRAEEQFERLKEFVERLLKTMKAEEEK

SEQ ID NO: 2159 - protein, 259 aa, synthetic construct
  REGION 1..259: note = Synthetic
SSSEIAFMLFELKLAAMAAKVVVETAQSAGDEEKSKLAKALVKLLEQTLRDAARSTDPRDLEIAKMVAELVKAAIKALEIAYEAERAGDEELSRLAEKLVKQLIRTLKKAANSTDPRDLEIAKMVAELVKAAIKALEIALEAEKAGDEELSDLAKKLVKQLLRTLEEAAKSTDPRDLEIAKMVATLVKAAIKALEIVFRAEKAGDEELSKKARELVKKLIKTLEEAAKSTDPRDLQKARDVALEVFAAIAKLESALKQQ

SEQ ID NO: 2160 - protein, 241 aa, synthetic construct
  REGION 1..241: note = Synthetic
SEEYLEYVKALYAAYVIASRINQISDSETKEKADKLMKKALKKLEDAWRRGDKETLKFVLTILKAVLLALQIFLQLKKISDSETVEKAERLMRAALEKLVQASDKGDKEAVKFVLLILEAVLLALKLFEQIKKISDSEFLQKAEELMRTALEKLLQAWRAGDKDAVAFVVLILKALALALKIFEQIEKISDSSTLEDAKRKMEKAFEQLLEAVKKGDEDSVAEVYAELAHVAANLEAAQEK

SEQ ID NO: 2161 - protein, 272 aa, synthetic construct
  REGION 1..272: note = Synthetic
TEEDMKEAKTAIELIQKMIEILAKSAGTDKDAKELARRLQEILKKLKEQLEEAEREGDPDKVKLVLKMLQAVLKIIEIFMAIQKLELAAGTDSRAKELAKRLKEILKQLLEKLLEAVEEGDPKKVELVLKMLDAVALIIAIFFLIQKLEKRAGTDSQARELAERLKQILKKLLEQLIEAVEEGDPEKVALVAAMLKAVILIIEIFEAIQTLEEQAGTDSRAKETAERLKKKLKELLAQLQKAVDEGDPKKVLTVYLKLLEVLADILAYLQKK

SEQ ID NO: 2162 - protein, 256 aa, synthetic construct
  REGION 1..256: note = Synthetic
SEKFELALHYLKQLMALIKTIAKRIAKAGDERSYRQVEKIFEQIRRELEEAKKSGDPRDLAIVLTLAQLAALMVQILLIALEIKKAGDETSYRQVEKIFEWIEQLLKEARKTGDPRKLAIVWRLAQLAYLMVQILLIALEIKKAGDEDSARKVEKIFEQIKRELEEARKTGDPRKLTIVWLLAQLAYLMVQILLIALEIEKKGDEESYRHVEKQFETIRKLLEEARKTGDPEFLKTVLKIAKLAYKAVKTALEEAD

SEQ ID NO: 2163 - protein, 240 aa, synthetic construct
  REGION 1..240: note = Synthetic
TEKALKLVKTAFKLAEQAERAYKETGDPRAKESAELLWKVAFQAVYIALLVSLVEKDTEEAAQRGDEKMYKYAKTALDLVKLALELALEALKKYAKTGDPRALKSALLLVAVAQLALNIAKLLLEVIAQTKEAEKRGDEKMLKYAKSALELVATALELAIRALKKYKKTGDPEALKTALELVKTAYWALLIALLLLAVIRDTKEAEKRGDETKLKIAETLLKIAQKLLEELLRALAARKE

SEQ ID NO: 2164 - protein, 253 aa, synthetic construct
  REGION 1..253: note = Synthetic
REEDFKFLATFAQFAVELAAEAADRAGNPDLKELVELIQKLLEEAKRTFNKGDFEKAQKLLEFAAQAAQAIQAVVDAFQIAKEAGNPALLELLKLILELLKKALETFFKGDTEKAAKTLEFAVQAAEAIALVVAAFQIAKELGNPQLQELVEQILRLLKKALETFEQGDEEKAQKLLEFAYQAAEAILLVVRAFAIAKEAGNPKLRTLLDLIVKALKKALETFEQGDYEQAQRLLEKAYKAARTILAQVKKAQ

SEQ ID NO: 2165 - protein, 240 aa, synthetic construct
  REGION 1..240: note = Synthetic
AEKAHKLVELALKLAKEADRAYKETGDPRAKESADLLYKVALIAHEIALRLRKVATKLEEAKKRGDEEMLKYAKTALELVETALELALEALETYARTGDPRALKSALLLVQVALIALKIAEALLEVIKQTKEAEERGDEDMLKLAKSALALVETALELALRALEKYKRTGDPRALATALWLVKVALRALELAQWILEAIKKTKEAEERGDEKHLRLSKDLLKAAQKELEEEKDALDKRKE

SEQ ID NO: 2166 - protein, 236 aa, synthetic construct
  REGION 1..236: note = Synthetic
SEEEKWLLLQAALLLAALAMLLRKGIDAEIVKTAIEILKEAMAQTKQGDPSKAKKLIETATLLVEALFLVEDLEELEKRGIDAEIVQKAIRILQEAMRQTQQGDPDKAKELIELAKLLIEALKLVRKLQELEERGIDAEIVQDAIRKLQEAMRQTLQGDPDKAKEFIEKAKLLLEALELVRKLLELEARGIDAEIVKAALKILKMAMEATRQGDPDSAKWAIAIAKHALAKLANRK

SEQ ID NO: 2167 - protein, 256 aa, synthetic construct
  REGION 1..256: note = Synthetic
SLRLFTEMLKIVATLIIILETARRFGVPEELLELLQRVLEKALELLKAALKAKDPETLSRVAAYLYMLLIVAQLAQILAEAERFGVPEELLELLRRLLRFALKLLAEAEQAKDPRQLDKVLALLTMLLIVAQLAQILAEAERFGVPEELLELLRRILAKAQKLLKEALQAKDPEELKRVHMLLAMLLIVAQLAQILAEAERTGVPEELLAELRRILEKALKLLAEAEKAKDPTQLLRVLLTLMVLLENAKTARKKA

SEQ ID NO: 2168 - protein, 256 aa, synthetic construct
  REGION 1..256: note = Synthetic
SLKEFSEMLAIVAHLQLILETARKFGVPEELLELLQRVLEKALELLKAALDAKDPEELSRVAFYLWMLLIVAQLAQILAEAERFGVPEELLAQLRRILRKALKLLDEADKAKDPRQLDAVAAYLSMLLIVAQLAQILAEAERFGVPEELLELLRRILRKAQELLKEAEQAKDPEKLWRVHMLLAMLLIVAQLAQILAEAERYGVPEELLAELRRVLKKAEKLLKAAEKAKDPTQLLRVLLELMVLLANAEKARKAA

SEQ ID NO: 2169 - protein, 256 aa, synthetic construct
  REGION 1..256: note = Synthetic
REEFLFEMALIVLQLESILAWAREFGVPEELLELLQRVLEKAEELLKAAEQAKDPEQLERVLLYLQMLLIVAQLAVILAKAERFGVPEELLAQLRRVLRKALKLLAQAEKAKDPRQLERVLLYLQMLLIVAQLAQILAEAERFGVPEELLALLRRVLRKAQKLLAEAERAKDPEQLKRVLLYLQMLLIVAQLAQILAEAERYGVPKTLAELLRRILEKAKKLLKQAEDAKDPTQLRRVLLELKLLLWLAKSAAANA

SEQ ID NO: 2170 - protein, 256 aa, synthetic construct
  REGION 1..256: note = Synthetic
REEILFKMALIVLQLKVILAWAREHGVPEELLELLQRVLEKAEELLKAAEQAKDPEQLERVLLYLQMLLIVAQLAVILAKAERFGVPEKLLELLRRILRKAAKLLAQAEKAKDPRQLERVLLYLQMLLIVAQLAQILAEAERFGVPEELLALLRRVLKKALKLLAEAEKAKDPEQLKRVLLELQMLLIVAQLAQILAEAERKGVPKTLAEFLRRILEKAEKLLEQAEKAKDPTQLTRVLTELKLLLHAAKSAAANA

SEQ ID NO: 2171 - protein, 258 aa, synthetic construct
  REGION 1..258: note = Synthetic
SEELTELVKKFLHHIQAALALLLKLMRNATSEETKETVKTLSEILTEMKERLSSGNPEDVRLALLVAQFLYHIARALLLLLELLANATSEETEETVRKLFEILRKMLEELKSGNPEDVRLALLVAQFLYYIARALQLLKELEENATSEDTRETVKKLFEILKKMLEELESGNPEDVRLALAVARFLAHIAKALQLLKELLENATSERTEETVKQLFEKLKEMLERLDSGNPADVTEALKAAIKLALTAWELLLKATEK

SEQ ID NO: 2172 - protein, 258 aa, synthetic construct
  REGION 1..258: note = Synthetic
SEELEQLLLAFYHALAAAKYLLEKLKANATSEETKETVKQLEEILREMEKRLSSGNPEDVRLALLVAQFLYHIARALELLKELLENATSEETKETVKALFEILLAMLEELKSGNPEDVRLALAVAKFLYHIARALQLLRELKANATSEETRETVKQLFEILKAMLEELKSGNPKDIHLALAVAHFLYAIARALQLLRELLANATSERTEETVRQLFEKLLEMLERLKSGNPDDVYEAVLEANKIYLTALLLKLQREKK

SEQ ID NO: 2173 - protein, 258 aa, synthetic construct
  REGION 1..258: note = Synthetic
SEELQELLLKFYHALAAAKYLLLKLKLNATSEETKETVRQLEEILRKMEKRLSSGNPEDVRLALLVAQFLYHIARALELLRELAENATSEETEETVRKLFEILLKMLEALSSGNPEDVRLALALAHFLYLIARALKLLKELLENATSEETRETVKQLFEILRQMLDELSSGNPKDVHLALALAWFLYAIARALQLLKKLLENATSERTEETVRDLFRKLLEMLERLRSGNPDDVFEAVLEANKIYLTALLLLLERKAK

SEQ ID NO: 2174 - protein, 260 aa, synthetic construct
  REGION 1..260: note = Synthetic
DETYLLLQLHMIVSEVQTLLEELARHSTDEEVKQKARELVEEVEQLAREAQKSKDPEDMERALLLAQLAQILIEVLLLLWRLKKHSTDEETKKKAKELVEQVERLWRKARDSKDPEDMKRALLLAKLALILIEVLLLLWELKKHSTDEEAKKQAKELVKFVEELWRKARSSKDPREMKRALLLAELALIAIKVLLLLWRLKKHSTDEETKKAAAESVKAVLELWKEARKSKDPEKMKTAATAAKQALAHIEALLERWKKK

SEQ ID NO: 2175 - protein, 253 aa, synthetic construct
  REGION 1..253: note = Synthetic
REEEWKDQLTKAVQLVANAFQIAAELGNPLLLELLATIMKFLEEAERTFKKGDWEKAQKLLEFALKAAEAILLVVRAFAIAKEAGNPKLQELVEIILRILKKALETFKQGDEEKAEKLLDFAYQAAVAILLVVQAFKAAKEAGNPLLRELVETILDILKKALETFEQGDYEKAQKLLEFAYQAAEALLQVVLAFLAAKNAGNPELRRKVEEILKRLKKALETFEQGDYEQAQRLLEQALREAHAILWEVLLHH

SEQ ID NO: 2176 - protein, 260 aa, synthetic construct
  REGION 1..260: note = Synthetic
SREYLLALLEAIAKDLKKAAEELERHSTDEETLRLATELVAFVSTLAHEAKKSKDPEDMERALKLAQLAHILIEVLLLLWRLKKHSTDEEAKKKAKELVEQVERLWRKARKSKDPEDMDRALLLAKLAQIAIEVLWLLWELKKHSTDEEAKKYAKELVKFVEELWRKARTSKDPEEMERALLLAQLALIAIKVLLLLWRLKKHSTDEESKKKAAQLVREVLELWEKARTSKDPEDMEEALRRAKEALQKIETLIWRAKAK

SEQ ID NO: 2177 - protein, 260 aa, synthetic construct
  REGION 1..260: note = Synthetic
SEAELLAHLWWIVTNVRLLLTELASTSTDEEALQKARELVEEVEQLYREAQKSKDPEDMRRALLLAQLAQILIEVLLLLWRLKKHSTDEESKKKAKELVEQVERLWRKARTSKDPRDMERALLLAKLALILIEVLLLLWELKAHSTDEEAKKFAAELVKQVEELWRKALKSKDPEEMERALLLAELALIAIQVLLLLWRLKKHSTDEETLKAAQEHVRFVLELWEKARSSKDPEAMKTAAYLAKLAQTNIEKLWTRWLTK

SEQ ID NO: 2178 - protein, 260 aa, synthetic construct
  REGION 1..260: note = Synthetic
HEVELLARLVEIVKKVQELLEELARHSTDEESLQKARELVEEVEQLAREAARSKDPEDMERALHLAQLAQILIEVLLLLWRLKKHSTDEETKKKAKELVEEVERLWRKARTSKDPEDLKRAANLATLAQILIEVLWLLWELKKHSTDEETKKTAAELVKQVEELWRKARTSKDPREMAAANLLAQLAQIAIQVLLLLWRLKKHSTDEESKKKAAQLVREVQELWETARTSKDPWEMVRALVRAREALETIEKLLRTAKTK

SEQ ID NO: 2179 - protein, 222 aa, synthetic construct
  REGION 1..222: note = Synthetic
SEEEQRVLAAFKALLKLSDLAEELARKGDETLFRMVQELLRQIFTLLKELKRAKENGDESTFERALRQIEALLRVLEALLQAAALAKLYEELEELGDERLSRMVKELLRQILELIQELLEAWQNGDSSTFERALRQIEQLLRVLEALLMAAKLAKHLERLEKKGDESLSEAVKQLLEAIQKLIQELLEAWANGDSSKFEEALKKIERLLLKLVELSKKAHDA

SEQ ID NO: 2180 - protein, 222 aa, synthetic construct
  REGION 1..222: note = Synthetic
SYEETLVELAQRYAAELKRLIEELERLGDEELVRMVKELLRQIKKLIEELERALANGDESTFERALTQIVRLLAVLEALRRAAELAKLYEKLREEGDERLSKMVKELLDQILKLIQELLEAWQNGDEETFIRALNQIKHLLDVLEALKQAARLSQLFEELAKKGDESLSKAVKKLLERILTLIAELLKAWQNGDETKFNDALILIKFLLQLLKALEKKAEEA

SEQ ID NO: 2181 - protein, 248 aa, synthetic construct
  REGION 1..248: note = Synthetic
SEELETAILALLMAVYANLLAAGVTEEQAERLLEAVKRSAEEIMAELKRREKEMPEELQELLREIAKLLITVFAELILAGVTEEQARRYLEAIKRLAEEILKELKRKLEEMPEELQELLKEIAKLLIAVFAKLILAGVTEEQAAAALEAIKRALEEILKELERALKEMPEELQELLKTIAILLIQVFAKLILAGVTEEQAREALKWVATALDIILKLLKRLLEEMPESKQETLKTAAFQAIKRTAAKV

SEQ ID NO: 2182 - protein, 220 aa, synthetic construct
  REGION 1..220: note = Synthetic
SEDEEFVEMLVKFLYKFAAKTGDETLRQIAETLRERLEKTKKAGDSSKMKELQTFLEVLATVIFLFAQARRTGDEDLRDIAEKLIEKLKRILEAGDLDKMKELQTFLEVLATVAKLFEQARRVGDETLKQIAKKLIKEFKKILALGDLDKMKALQTKLEVLATLAELFELARRVGDELLRAMAEKLIEKFKKISEAGDEDRMKELQKELEWLKEVAHQTE

SEQ ID NO: 2183 - protein, 178 aa, synthetic construct
  REGION 1..178: note = Synthetic
LEEIKEKIERMWQQAKETGDPKYYYTAAALAHLLELFKEAEEQEERAKRRGDEQLKRIVEKIKRMLEQYLKTGDPTALAAAHALSTLFQLVEKAREQEERAKRRGDEQLQRIVEKILRALQEYLRTGDPHALLYAKWLAELFERVEEALEQFEEALRRGDESLLKSVLWTIVALALQT

SEQ ID NO: 2184 - protein, 178 aa, synthetic construct
  REGION 1..178: note = Synthetic
LEEIQEAIERMWQAAKEIGDPKYYWAAAALQHLFHLFAEAEEQEERAKRRGDEELLRIVEKIQRMLQQYLETGDPTYLAAASALFTLFQLVEKAREQEEKAKRRGDEQLLRIVERILRALQKYLETGDPHALLYAKWLSELFERVEEAKEQFEEARRRGDEELLKKVLHTLVKLRLET

SEQ ID NO: 2185 - protein, 249 aa, synthetic construct
  REGION 1..249: note = Synthetic
SEVEKTLAKFLFKLVLEHAEHAGNEEAIRRVEQLIRQLEEAMKQYDKTGDPKAKEREKEVLEQAKMIAKILFVLQLAQKAGNEEAIRHVERLIKKLLEAMKKYEKTGDPKAKEELKRILEAAEMIATLLKVLLLAQEAGNEEAIRQVERLIKQLLEAMKTLEKTGDPSAKEILKRVLENAEMLSKALAVLKLAQEAGNEEAIRAIEALIKALLEAMKLLEKTGDPKAKEALKKILAFAEWLSESLAEKI

SEQ ID NO: 2186 - protein, 252 aa, synthetic construct
  REGION 1..252: note = Synthetic
SLEFDLQALEVEQAVTNAHAAAREAGNEKLEKAVRIIKELLEEAKRTRAQGDEKKAQELLEFLLQAAKVILLVAQAYLIAKKLGNSKLLEAVEIILELLIEALETFKQGDEEKAQKLLEFVLLAAKVILLVAQAYEIAKRLGNSKLLEAVEIILELLIEALRTFKQGDEEKAWELLLFVYAAAHVVLLVAQAFEIAEEAGNDRLKEEIERILEKLIRALRTFKQGDEEKAWKELKEVILAANKVLTKAKQQK

SEQ ID NO: 2187 - protein, 249 aa, synthetic construct
  REGION 1..249: note = Synthetic
SLEELATFASTAHYALTLAEKAGDEDALETFKELWRQLHEALSRALETGDPKDKRQLEEMLELAKFLITLLQALLLAQAAGDEEALRTVKELLRQLLEAIEKYRKTGDPRVKALLEEMLELAKFLITALQALLLAQQAGDEDALRTVKRLLEKLLAAIRKYRKTGDPKAKALLETMVELAAFLITALQALLLAQQAGDEEALRQLKRLLKQLLEAIEKYEKTGDPKAYTQLLKMYLKAAHLLAQLKSKL

SEQ ID NO: 2188 - protein, 220 aa, synthetic construct
  REGION 1..220: note = Synthetic
LEEVAKYFKTAATAIELARRAGNEDLLKEIERLFAEIVRATKEGDSRTVQEAYERVAFMITAAKALLLAAQAGNEELLRQIKKLLRKILEALREGDKDTVAQAKRNLEFMITAAKLLLLAQAAGNEELLKWIKKVLKKILEALREGDKDTVAQAHRELSYLIFVAAALLLAQEAGNEELLEKIEKLLKKILEALREGDEDKVTWAAQNVIEALVKAKLTK

SEQ ID NO: 2189 - protein, 220 aa, synthetic construct
  REGION 1..220: note = Synthetic
SAEEKVAKSLIATLRELAARAGNEELLREIERLIKEIEEALKEGDSETVKKALERVYFMVTAAKALLLAKQAGNEELLKEIKKLLKKILKALKEGDKDTVRQAWRNVEFMITAAKALLLAQQAGNEELLEAIKKLLRKILEALREGDKDTVAQAVRNVAYMITAAKALLLAQRAGNEELIKSIEAALKAILNALREGDSLLVEIAAEHIKELIKQAAKEL

SEQ ID NO: 2190 - protein, 251 aa, synthetic construct
  REGION 1..251: note = Synthetic
TEEETYEELIKTNIENVLEMAERAGDEQALETVKRLSEKAQKMIELLRTYGDPRAEEALERIHKLVAIILKFLKALLMAQKAGDKDAEETLKELSEKFLEMIRLLETYGDPRAREALKKIEKLVEIIIKFLHLLLLAQKAGDKDAIETIKRLSKKALEMIQLLERYGDPRAAEALKRIEKLIEIIIKFLKALLLAQEAGDEDAIRKLKELSKFALSLIQALETYGDPRAEKALRLIETNVEQIIFKLEERK

SEQ ID NO: 2191 - protein, 251 aa, synthetic construct
  REGION 1..251: note = Synthetic
SLEEKFEEKIKKEIEKALELAKKAGDEQALETLKRLAEKAQKMIELLRTYGDPRALAKLARIANLVRIIIKFLKALQLAQQAGDSEAEETLKELSEKFLEMIRLLEEKGDPRADDALKKIEKLVEIILKLLKALRLAQEAGDEDAIETLKRLSKRALEMIQRLEKYGDPRAKEALERIEKLVEIIIKFLKLLQLAQEAGDEEAIRWIKELIKQALEAIKYYETHGDPRAATYLHAIEQLIEVLLEELEKRK

SEQ ID NO: 2192 - protein, 249 aa, synthetic construct
  REGION 1..249: note = Synthetic
SEDEAHELRHTLLLVLAAAKLAGDEEAIRTAKEIIEKLKRAQEEYAKTGDPKAQEIMEELTRTAKLLLTILEVLLLAQKAGDEEAIRTAKKIIERLIKAFKEYQKTGDPKAQEEMEQLVRTAKLLSTLLRVLILAQEAGDEDAIRTAKKIIKRLIEAREEYEKTGDPKAQERMEKLVAQAKALKNVLEVLILAQRAGDEEAIRRAKEIIKQLIEAFETYQKTGDPKAKERMLKLSLAASLLSLFLKHKI

SEQ ID NO: 2193 - protein, 249 aa, synthetic construct
  REGION 1..249: note = Synthetic
SSEEQFELQLTLLKFAALARSAGDEEAIRTAKEILEKFERAREEYEKTGDPKAQEKMEKLTETAKKLITLLEVLNLAQKAGDELAIRTAKEIIERLIRAFEEYKKTGDPKAQEEMEQLTRAAKLLSTVLRVLILAQEAGDEDAIRTAKKIIKQLIEAREEYEKTGDPKAQERMEELVRFAKLLSTFLEVLILAQRAGDEEAIRRAKELIKKLIEAFEEYQKTGDPKAEERMLKLALAAYLLILHLRSKI

SEQ ID NO: 2194 - protein, 249 aa, synthetic construct
  REGION 1..249: note = Synthetic
TEDEQAALFHTVLAVAAAARLAGDEEAIRTAKEIIEKLERAVEEYEKTGDPKAQEKMEELARTAKLLWTILEFLLLAQKAGDEQAIRTAKKIIERLIKAKEEYDKTGDPKAQEEMEQLTRTAKLLSTILRVLILAQEAGDEEAIRTAKKIIKQLIEAREEYEKTGDPKAQERMEKLTRAAKALANVLEVLILAQRAGDEEAIRRAKEIIKQLIEAFEKYQKTGDPKAKERMLKLSLAASLLYVELAFKI

SEQ ID NO: 2195 - protein, 249 aa, synthetic construct
  REGION 1..249: note = Synthetic
SEREQTALAKTIFLVANAAHRAGDEEAIRTAKEIIEKFERAVEKYKKTGDPKAQETMEELTKFAKLLLTVLEFLLLAQTAGDEDAIRTAKKLIERLLRAFEKYEKTGDPKAQEEMEQLAKFAKLLSTILRVLILAQKAGDEDAIRTAKKIIKALIEAREEYEKTGDPKAQERMEELAAQAELLEAVLEVLLLAQEAGDEEAIRRAKEIIKQLIEAFEEAQKTGDPRAYERMFKLWLAAYQLSMWLKARK

SEQ ID NO: 2196 - protein, 249 aa, synthetic construct
  REGION 1..249: note = Synthetic
SLSNYFALLLTVYLLAAAAEYAGDEEAIRTAREIIEKLERAAEEYRKTGDPKAAEKMEELTKFAKLLLTLLELLILAQQAGDEQAIRTAKKLIERLLRAWEKYEKTGDPKAQEEMEKLVENAKLLVTVLRVLALAQKAGDEQAIRTAKKIIKKLIEAREEYEKTGDPKAQQTMESLVTFAKALLALLEVLILAQQAGDEEAIRRAKEIIKKLIEAYEEAEKTGDPKAVHKMVKLVVAAWKEILELRARI

SEQ ID NO: 2197 - protein, 252 aa, synthetic construct
  REGION 1..252: note = Synthetic
SEEFKKQLKEVMKLVVTAIEIAVDAGNDKLKKAVDIISKLLEEALRTRAQGDEKKAQELLEFVLQAAKVVLLVAQAYLIAKKAGNSKLLEAVEIILELLIEALETFKQGDKEKAQKLLEFLLEAAKVVLLVAQAYLIAKELGNSKLLEAVEIILELLIEALRTFKQGDEKKAQELLAFVLQAAEVILMVARAFKLAERAGNDRLKEELERILEKLIRALRTFKQGDEKKAQETLDELTEAALWALFQAAQAL

SEQ ID NO: 2198 - protein, 248 aa, synthetic construct
  REGION 1..248: note = Synthetic
SELDEFRLVEIYQLALYALALAKKAGNEQAERIVKEVIKQIEKMRKQRQNGDPRAQERVETLARLLRILLTALAALKLAKEAGNEAAEEVVKEVIKAIIEMIERRQNGDPRAQERVETLYELLRILLTALAALKTAKEAGNEQAEEVVAEVIKKIIEMIRRRNNGDPDAQKKVEYLAYLLRILLQALEALKLAREAGNEDAEREVEEIIKKIIEMIRRAQNGDPEATKRVLALSEKLAKLLAKLQAEK

SEQ ID NO: 2199 - protein, 220 aa, synthetic construct
  REGION 1..220: note = Synthetic
TDLEFVKVLWTIFTLLLEASKTGDSKLQTVLEKLLKQAIKAVKAGDLERAKQLALFAKVLITILALLRAAKKTGDKKLREVVEKLFEKALQAAEKGDVERAQELKAFAEVLLTILALLRAAKELGDERLEQVVKRLLEKALEAAEKGDLKRALTLAAFAAVLAAILELLRQAERAGDESLKREVEKLWEQALRAAEAGDLSKAADLLAKALFALLKISKK

SEQ ID NO: 2200 - protein, 220 aa, synthetic construct
  REGION 1..220: note = Synthetic
SEKDFYKVLATILKLMEQANQDGDEKLKSVVQALSDKAAKAVKAGDKERAQALAAFAQVLITITELRRAAKKTGDEKLERVVEKLFERALQAAEKGDLKRAQELKQFAEVLLTITELLRQAKETGDERLRQVVRALLEKALEAAEKGDLKRAQELAEFAKVLITILKLARLAAEAGDERLRREVEKLREQALRAAEAGDLEKALDLALKALLAMSEIHAK

SEQ ID NO: 2201 - protein, 220 aa, synthetic construct
  REGION 1..220: note = Synthetic
SEEKFNQVLKTILKLLKKAEEKGDEKLYKVVLKLVEKALKAWKAGDLERADELMKFAEVLITILKLQDQAAETGDEKLRKVVEKLFEKALQAAEKGDLKRAQELRQFAEVLITILELLREAKKTGDERLEQVVRALFEEALKAAEAGDLKRAQELALFAEVLITILELQRQAERKGDESLLKEVEKLREQALRAAEAGDLERAKELANKALILLLETFLA

SEQ ID NO: 2202 - protein, 220 aa, synthetic construct
  REGION 1..220: note = Synthetic
SEELFEAVLDTIATLINEAVKKGDKKLLTVLLKLLKKAKEAAKKGDLERAQQLALFAEVLITIAELEDLAKEHGDKKLKEVVKKLKEKALQAAEKGDLKRAAELKQFAEVLITITKLLKQAAETGDSRLREVVRALLEKALEAAEKGDLKRAQELALFAKVLAQITELQRQAERKGDESLLREVEKLREAALRAAEAGDLQRAKELALEATERAAKTLKK

SEQ ID NO: 2203 - protein, 220 aa, synthetic construct
  REGION 1..220: note = Synthetic
DEEDFERVLDTIQDLLVRAAEEGDEKLFIVVAKLYKKALEAKKKGDKERAQALMFFAEVLITILELLRQAKEAGDEKLERVLKKLLEKALQAAEKGDEKRAAELAEFAKVLALILVLEKLAKETGDERLKKVVRKLLEAALEAAEKGDTQRARELAKFAAVLITILFLQRLAEKTGDESLLREVEKLREQALRAAEAGDLKRAQELQEEALEAILKTAQK

SEQ ID NO: 2204 - protein, 248 aa, synthetic construct
  REGION 1..248: note = Synthetic
SEEEFKYLATAYAALSTVAAAGNERVKRQIEQLLRELEKALEELKKTGDPRAAEKAQQALERLEYLLMALIALLLVRKAGNSRVQEQIERLLQKLLEALQEAQRTGDPQAERKAEEALAAIEYLMMALKALLTVRKAGNEEVQRQIEALLEKLLQALQEREKTGDPRAEEKAEKATDRIRALLLALTALLLVRDAGNEEVQRKIEELLKKLLKALQLLEKTGDPRAKETATRAMLKLAAALFNLQLDK

SEQ ID NO: 2205 - protein, 249 aa, synthetic construct
  REGION 1..249: note = Synthetic
EEQEQREFLYTAQSALQAAKKAGDEEVIRTIKEMIEKIKEALEKVRKTNDPRAREAFEELWRQVATLLTALLALLAAQKLGDEQVIRTIKEMIKKIIEALKILQKTNDPRARERVEELARQVAALYEALLALAAAQRLGDEEVIRFIAEMIKKIIEALEIKQKTNDPRAEERVEELRRQLAVLLTALAALEYAQTAGDEDAIRWIEEMIKKIIEALKELQKTNDPRARQRVKELHHKVAVALHTLAAVI

SEQ ID NO: 2206 - protein, 255 aa, synthetic construct
  REGION 1..255: note = Synthetic
DEEEERLEAFLRKLQEIANEALMKVLEAGDEEFLKIILEASDTIEKLIREYKKTGDPRAEETMKLIKLLIELLKIAVEALLSAKAAGDEELLRRIKEALRTIRELIERYRQTGDPRAFETMELIKFLIELLYIAVEASRMVKKLGDEELLRRIKEALRKIEELIERYRKTGDPRAKETMALIELLIRLLALAVAALILIKRLGDEELLRQLYAALRTIERLIKEYEKTGDPRAFEKMKEISEFIKKLANKVFRKY

SEQ ID NO: 2207 - protein, 255 aa, synthetic construct
  REGION 1..255: note = Synthetic
SEEQEEMEAFAEKIETLAELALFLAEKAGDEELSRLIKELVEKVQELVRQYKKKGDPKAEETLAMLARAIKILATAASALLAAQRAGDEELSRLIKELLKQIIELVKKYEKKGDPKAEEALEMLSRAIAILHTAAEALELAQRAGDEELLRLIKELLKQVLELVNQYLKKGDPKAKELLEMLKRAIEILLAAAEALELAQRAGDEKLSRKIKEVLHAVVELVRKYKKKGDPKAEETLKDLKTLIDLMLSVARAAE

SEQ ID NO: 2208 - protein, 252 aa, synthetic construct
  REGION 1..252: note = Synthetic
SEFFEKLAKKVAKLLKKAEQIAKEAGNDKLKKAVKIIKELLEEAKRTAAQGDEDKATKLLAFVYNAASVVLLVAQAYLIAKKAGNSKLLEAVEIILELLIEALETFKQGDEEKAAKLLEFVQRAAKVVLLVAQAYLIAKKAGNSKLLEAVEIILELLIEALRTFKQGDEKKAEELLKFVLQAAYVILLVAQAYLIAEEAGNSELKKEVEEILDYLIKALRTFKQGDETTAQLLLTLVLSAAQEVLEKAEAQL

SEQ ID NO: 2209 - protein, 252 aa, synthetic construct
  REGION 1..252: note = Synthetic
SAEEKQEIDEALTMVSQAAVMLETYGDEEAVRTLEDLKRKLEEAKQAIEETGDEKYREKLQEILEILKAIYMVAAALLALKRFGDEEALRVLEELLETLLEAVKKILTHGDEKYKAQLRTIAMILEAIYMVAAALLILKRYGDEKALRTLEELLKRLLEAVKRIRKTGDESALEALLRILEILKAIYMVARALELLKELGDEDQLKKLEKLLEALLEAVKAILTHGDEKYREELKEIYEALSRIALKAALRK

SEQ ID NO: 2210 - protein, 252 aa, synthetic construct
  REGION 1..252: note = Synthetic
SAEEKKEILEALEMVTKALVLLEHYGDEEALRVLEALLRTLEEAKQRIEEKGDEKDREKLKEIKEILEAIYMVAAALNALKRFGDEEALRTLEELLETLLEAVKAILDKGDEKYKKQLKTIAMILEAIYMVAAALLALKRYGDEEALRTLEELLKRLLEAVKRIRKTGDESALEALLEILEILKAIYMVARALELLKELGDESKLKKLEELLRELLEAVKKILTHGDEAAREKLKEIYKALLKIALNAELAK

SEQ ID NO: 2211 - protein, 252 aa, synthetic construct
  REGION 1..252: note = Synthetic
SEEADWLLKVLFSLVDEALRLLAEYGDEEALRTLEALKRQLEEAKQAIKETGDEKYQEELKEILAILMAILAVAQALKLLAEYGDEEALRLLQELLERLLEAVKKIRKHGDETEMKKLADIYKILKAIYMVALALKLLKELGDEEALRVLEALLEALLEAVKKILTTGDESAKKKLDEILQILEAIYMVARALKLLAKLGDEDQLKTLRVILKFLLEAVKRILKRGDEVAKFLLEYILKQLKEIYARAVKQE

SEQ ID NO: 2212 - protein, 264 aa, synthetic construct
  REGION 1..264: note = Synthetic
TEELLEKLYKLLSQIELLLKEAEKRYKETGDPQWKKIYEIAKAILERVKRAAKSGDPREMKKALLLAKLIISVFRILKLLEKAEKRYRDTGDPQWAKIYEIAREILEQVLRAIESGDPDEMKKALLLAQLIILVFEILELLEEAEKRYRDTGDPKWKKIYEIAKEILEQVLRAIKSGDPSEMKKALLLAQLIISVFKILKLLEKAEKEFKRTGDPTWQEIYEKAKKILEEVLRAIESGDPRQMKEALLKAKAIIAVFETLKKAE

SEQ ID NO: 2213 - protein, 233 aa, synthetic construct
  REGION 1..233: note = Synthetic
SEEAKKYVEWLLTILLHLAMKAFKAGDEETAAFLLRAALKLYEASESGDPREMEQALLLAQVALLLWELNELLRQAAAAGDSETYELLRKAAESLKRALESGDPREMRQAQLLAKVVLNLWYLLELLRAAAAAGDDETYELLRKAAESLKRAVESGDPSEMRQAHALALVVMFLAILLEMLRQAAAAGDSEKYELLREAAEKLKEAVESGDPQQMTEAIKEAMRVMLAALDRK

SEQ ID NO: 2214 - protein, 231 aa, synthetic construct
  REGION 1..231: note = Synthetic
SEHQEELTDLLEDVLKIAEEAKARGDSETAKIAVKILETILKASESGDPRDVERAKLLAELLKLVLQVRALYEAAKKRGDEETMRIAAEITKEILRAIESGDPRDVERAKRLAALLQRVREVAELYEEAKKRGDEETMRIAAEILKKILRAIESGDPRQVKEALLLAKLLKTVEFVQALKERAAKRGDEEAMREADEITKKILRAIESGDPRDVREALHRAAKLWAKFMKT

SEQ ID NO: 2215 - protein, 231 aa, synthetic construct
  REGION 1..231: note = Synthetic
SEEWWKLAKLLNQVARLYKAAARRGDEEKMRIAKKILDTIREALKSGDPRDVERALLLAELLQLLEQVAALIEKAKKRGDEETLKIAKEITKEILRAIDSGDPRDVKRAKMLAKLLQAVEEVRELYEAAKRRGDEETMRIAAEITKKILRAIESGDPKDVATALALAWLLKLVEEVTQLYERAKKRGDEELMRQAKEITEKILRAIESGDPKDVLDASLAATRLKLKFEDL

SEQ ID NO: 2216 - protein, 237 aa, synthetic construct
  REGION 1..237: note = Synthetic
SEEAREYLKTAEALFRNAEKLAREANTYGDEQAKRLFKSLLTLALQLLKAWLAGDPKQLEEVLRRAAYLLTAFKLLQNMKELRELYEKHGDEQAQRLLEQLEKLFEQLLEAYKSGDPDKLQEVAERAEYLLTAFKLLQNMKKLREAYEKHGDEQAERLLQSLKKLFEALLRAYASGDPSQLSEVAARADQLLNAFALLELMKTLRELARKHGDSAAQEVLEALEDYFEKSLKKYEEG

SEQ ID NO: 2217 - protein, 237 aa, synthetic construct
  REGION 1..237: note = Synthetic
SEEEEAYLETAKALFKNAEKLMRLANTYGDEQAKKLVKSLMTLALQLLKAHREGDPRKLEEVRRRAAYLLTAFKLLQNMKWLRELYEKHGDEQAQRLLEQLEKLFEQLLEAYKRGDPRQLQEVKERAEYLLTAFKLLANMKKLRELYEKHGDEQAERLLQSLKKLFEQLLRAYASGDPSQLEEVAARAKQLLFAFDLLLLMKALRELAEKHGDSAAQELLEALEEYFEESLKKYEEG

SEQ ID NO: 2218 - protein, 237 aa, synthetic construct
  REGION 1..237: note = Synthetic
SEEEKKYLDTAKKLFDNAFKLLEAANKHGDEQAKRLVKSLMSLALALLEAYNKGDPSKLEEVLRRAQYLLTAFKLLENMRALRERYEKKGDEDAQRLLEQLAKLFEQLLEAFKSGDPKQLQEVKERAEYLLTAFKLLANMEKLRELYEKHGDEQAERLLQSLKKLFEQLLRAYASGDPDQLEEVAKKAFNLLLAFWHLLLMKRLREMAEKHGDELAQKLLEALERNFETLLKQYEEG

SEQ ID NO: 2219 - protein, 252 aa, synthetic construct
  REGION 1..252: note = Synthetic
SELFEYNAAAVERLLAKAEQIAKEAGNDKLLKAVRIIKKLLAEARRTRAQGDEEKAWQLLAFVALAAKVILLVAQAYAIAKKLGNSKLLEAVEIILELLIEALETFAQGDETKAAKLLEFVYRAAKVILLVAQAYEIAKRLGNSKLLEAVEIILELLIEALRTFKQGDEEKAEKLLTFVLEAAKVILLVAQAYKIAEEAGNEELKEEVEQILTLLIKALRTFKQGDEVKAQLLLWLVLQNAQSVLEKAEAQL

SEQ ID NO: 2220 - protein, 240 aa, synthetic construct
  REGION 1..240: note = Synthetic
STAEASEIWLEVRALQKMAERLRRQGDERAAELLEQIARALLAKLKKADDPRQLEALKRKLEIAYAVAQLLEMASRLEEQGDEEAAELLKQIARELLEKLRNADDPRTLEKLKTKLKIALQVAKLLEAASRLEAEGDEKAAELLKQIAKALLKELRNADDPRVLKRLWLKLNIAAAIAELLEIASALAEQGDERAAKELTAFAQRLLEKLRNADDPTDLTKLWKELVRAIEKAEKRLKEV

SEQ ID NO: 2221 - protein, 237 aa, synthetic construct
  REGION 1..237: note = Synthetic
SEEDAKYKKTALALWNNMILLEAAYRKTGDEQAARLLESLKKLLEALERAQKEGDPDQLEEVLRRAEYLLTAFKLLENMRTLRALYEKHGDEQAQRLLEQLEKLFEQLLEAYKSGDPRALQEVKERAEYLLTAFKLLQNMKKLRELYEKHGDEQAERLYQSLAKLFEQLLRAYASGDPSQLLAVAIAADQLLHAFELLQQMKRLRELYERHGDSKAQERLEILAENFERSLAKFEEG

SEQ ID NO: 2222 - protein, 230 aa, synthetic construct
  REGION 1..230: note = Synthetic
SEQQDRLFALMLRLFALVEEMANKNPELAKLILQLLERAIKASEAGNAEAVQELQAFLRLLELIAELVKLIEEMQNKNPELAELIRQLIEKAIRALQAGNKEEVQELQTFAKLLFLIAALVKLIEEMQNKNPALAELIRQLIKKALRALQAGNKDEVKEALTFAKLLFMIAKLVKLIEEMQNKNPELAKEIRELIEEAIRALQAGNSEAVKKALHAALRLILKALKTKLI

SEQ ID NO: 2223 - protein, 263 aa, synthetic construct
  REGION 1..263: note = Synthetic
SAEEAHIRLALLFLKRLMEHARKQYEKHGDERWRQVYELAKKIVEEAEKALKAGDPRQIERANKLFELIFYIFTLLELMKEAEEFYRKHGDEKWQTVYEIAEEIVEKALQAIKRGDPRDIEQALLLFELIILIFRLLKLMERAEKFYRKHGDSDWQKVYEIAAEIVEKALQALKNGDPREIEEAIRLFEIIIAIFELLELMERARKAYEKHGDEAWRTLYELAKAIVEFALLAIKAGDPTLIERAKKWFKEIFRQFEELARRE

SEQ ID NO: 2224 - protein, 266 aa, synthetic construct
  REGION 1..266: note = Synthetic
TEELKEQLRWLLELLKHLATVLKKIYARYGDEEVRKVLEALEKAFRVAEEAERAGDPDKIKKAQLFLQLALLLAELAQFMWELQQIYEKYGDEEVAKVLEALKHALEVALRALEAGDPRKIKEAQLFLKLALLLAKLAFFMWRLQQIYEKYGDSEVAKVLEALKKAIETALQALKAGDPEKIKQALLFLQLALLLAQLAEFMWELQKIYEKKGDKLVATVLKLLKTAIERALKALDAGDPDKIKKAQETLKTAYKAAQQAKRTHKE

SEQ ID NO: 2225 - protein, 266 aa, synthetic construct
  REGION 1..266: note = Synthetic
TEELKAQLRRLLTELKAHYKALVNLAKATGDEEVKKVLELLELAIKYAEEAERAGDPRKIKEALLFLQLAKLLAALAFFMFELRLIYEKDGDEEVRKVLEALAKAIEKALQALKAGDPRKIKEAQLFLKLAYLLAQLAQFMARLQKIYEKHGDSEVAKVLEALKKAIEYALQALEAGDPEKIKQALLFLQLAYLLAQLAEIMHELQKIYEKKGDENVARVLEKLREAIKKALDALEAGDPSKIKEAQRALTEALALAKSAQLAASH

SEQ ID NO: 2226 - protein, 266 aa, synthetic construct
  REGION 1..266: note = Synthetic
SELEKLQLRMLLTELKDFLERLKKIYAKEGDEEVRKVLEALEKAFRYAEEAERAGDPRKIQEALLFLQLALLLAQLAEFMYELQKIYEKHGDEEVRKVLEALKKALEYAIQALEAGDPSKIKAAQLFLTLAYLLAQLAQFMWRLQAIYEKYGDSEVKKVLEALKKAIEIALKALEAGDPEKIKKALLFLQLALLLAKLAEFMWELQKIYEKKGDERVAKVLELLKTAIKSALIALDEGDPTAIKQAQESLKLALKKAKEAQKAHKK

SEQ ID NO: 2227 - protein, 299 aa, synthetic construct
  REGION 1..299: note = Synthetic
SEHKLHAAALKLRLLAEKVKELVEKIRANVSEEDSEKARALEEQVERLMQAAKRALEILKKTGDPRAEKLLKLAFKALEIILLAAQVIWLVVQIKAHVSEEDVEFARELSQQVWELMETARAALEILLKTGDPRAERLLQLAKRALEIILLAAQVIWLVVQIKAHVSEKDAEVAKALSRQVYELMEAALRALEILLKTGDPRAEKLLELAKRLLEIILLAAQVIWLVVQIKAHVSESDSETAAQLSDSVWKAMETAFRALLILLKTGDPKAQETLEEAKKVLETLLEFAKELWEQVKKK

SEQ ID NO: 2228 - protein, 251 aa, synthetic construct
  REGION 1..251: note = Synthetic
SEEEKKLQHLASAVRLWATAAAELYKKTGDPAAAYVEELLKRALEEAERAQKTGDLEEAIKMLKLALLAAYVAFNLRKAQETYEKTGDPAAALVSELLWKALEEARRAFETGDLEEAIKMLKLVILAWKVAQNLRKAEELYQKTGDPAAATVSELLAKALEEARRALDTGDLEEAIKLLKLAILAWKVALNLRKAEETYKKTGDPAAAYVSQKLREALEEARRAFDTGDLEDAIATLEHVIKLWEIAQQLK

SEQ ID NO: 2229 - protein, 231 aa, synthetic construct
  REGION 1..231: note = Synthetic
TEEELQELAEKVWILAAYASYIANLLGDEELQRRVDALLKQAEESLEELARKGATDPRILARVELQLTAAKVIYLALQAIKLARELGDSELIRKVKELAKKALQSFQELQEKGATDPRIFTLVRLQLTAARVIYLALEAIKLARELGDEELIRLFEELAKKALASFDKLQKKGATDPRIRTEVKAQVKAAEAIAAALYAIWSARKQGDERKIEEAKKTAEQLLRRFEELQS

SEQ ID NO: 2230 - protein, 256 aa, synthetic construct
  REGION 1..256: note = Synthetic
SEAVKKALTLLAEIAEEMVEEARQLAKENGDEKSLRILKELAEQLKRTFEEFKKKGDPRLNALLNLLLDAIEAMALILKALQKAKENGDEESLRILKELSEQLKRTLEQFQETGDPRLEELLELLVRAIKAMVLILDALQLAKENGDESSLKILKELSEQLKRTLDAFQETGDPRLKELLELLVAAIKAMYLVLAAIQLAKENGDESALRKLKKASETLQKLLKTFQETGDPRVKHALSQLVKAIEAAAKRLAAKK

SEQ ID NO: 2231 - protein, 224 aa, synthetic construct
  REGION 1..224: note = Synthetic
DENAKLIMATAKELAAQAQELAERLGNPDLRRLVATIQAAIRRAEKAGDEKQILLAYLMARAILLAAQAYELAKRLGNPDLLTLVKKIIERIKEALDRGDSKDILLAAAMAKAVLLAAQAYELAKRAGNPLLLKVVKKIIERILEALKDGDEKKIQLALLMARAILLAAQAYLLAKRAGNPELLKTVKTIIKHILKALEKGDRLAIETALEFAKTVLEKAKAEE

SEQ ID NO: 2232 - protein, 258 aa, synthetic construct
  REGION 1..258: note = Synthetic
SEEILKVLVAILYVALKLFHAAAHARKAGDEEALQKVKELLEELKRLYKTAAKITDPRVLEIIRILVEIIAVAADLIEAIVKARAAGDEEALEQVRRLLERLEDLLKKAKKITDPKDLEIIRILVEIIAVLAQLIKAIVDARKAGDEEALRQVEELLEQLYRLLERAKRITDPRELEIIRLLVAIIAVLAQLIRAIVEARKAGDEEALETVLKAFKALERLLKEAKNITDPRRLATIEELVALIAALAKAIEKFVKTK

SEQ ID NO: 2233 - protein, 258 aa, synthetic construct
  REGION 1..258: note = Synthetic
SEEIYELLVAILYVAFKLFHAAAWARKAGDEEALQKVKELLEQLKRLYKKAAKITDPRDLEIIRILVEIIAAAADLILAIVKARAAGDEEALEQVLRLLERLEKLLKEAKKITDPQRLEIIRILVRILQLAAKLIEAIVEARKAGDEEALRQVEELLEQLEKLYERAKRITDPTELEIIRILVEIIAVLAQLILAIIEARRAGDSEALETVEKLFKALERLLKEAARITDPARLRKIETMVRLIAKLAKAIEKFVKTK

SEQ ID NO: 2234 - protein, 258 aa, synthetic construct
  REGION 1..258: note = Synthetic
SEHAFEILRAISEAAAALLAAADAAKEAGDEEALQKVKELLEELKRLLEEAVKITDPKKLEIIRILVEIIAAAAQLIRAIVEARKAGDEEALEQVLRLLARLDELLKEAKKITDPEILFIILILVEIIAVAAQLIEAIVEARKAGDEEALRQVEELLEELERLLERAKRITDPRELFIIAILVNIIAALAQLIKAIVEARKAGDEEALKELEKLLEALERLLKEAKNITDPRRLLKIHATVLVIARRAKEILKKIKEK

SEQ ID NO: 2235 - protein, 197 aa, synthetic construct
  REGION 1..197: note = Synthetic
SEIAEFAKKWVAKAEEILKELEERAKRQGDEQNKRIIELAQRLLQKLKEALEKTNSPEILAMLLAVANVVWAIALLLEVKERAERQGDEQNLRLIKLAWELLYELLQQLEEKNSPEILTMLKVVATVVEAILTLLELKERAERQGDEENKKEIEKAIRVLFELLKKLQKTNSPSILTALEIVAHIVREILEELRRQE

SEQ ID NO: 2236 - protein, 259 aa, synthetic construct
  REGION 1..259: note = Synthetic
SFWEALATYLKILKVLHEIKKLLAEAQRAGDEESQRRIKKLIEIAKELLEQVNNATTKEQLEQILTTAEILLVMLQIIKLLLEAQRAGDEESQDRIRKLIALAEELLEKVRNATTKEQLKQIRTTAQLLQVMLAAIALLLEAKRAGDEESERRIRKLIEQAEELLEKVLNATTDEQLEKIRATANILLVMLQVIALLLQAQKAGDSESQKKIRELIKKLEELLEKVRNATTSSQLYKIWLKAAEIQLRLEEIQREQEAK

SEQ ID NO: 2237 - protein, 291 aa, synthetic construct
  REGION 1..291: note = Synthetic
SELELTVALLRIHAIASTAQAVVSTARKLYKKLGDPKAEELARQAEAIHRKLKELYEELARATTPEQYRRLLLSAEILYIILKAIEVVLRALKLYREAGDPKAAELAKKAEEIMRQLQRLFEELERATTPEQFERIAKSARILYVILKAIEVVLRALKLYQELGDPKAAELAAQAERIMEKLEELFRELERATTPEQERRLYLSAEILYLILKAIEVVLKALKLYREAGDPQAEKLARTAEKIMKWLQALFERLERATTPEQFEELYKAAKEYAKALEAIEESLKALAKAQ

SEQ ID NO: 2238 - protein, 291 aa, synthetic construct
  REGION 1..291: note = Synthetic
SEIEARVASAKIDAVVSTAKAVVSTARKLYKKSGDPKAEELARTAEDIARKLKELSKELERATTPDQFRRLTVSAFILYVILKAIEVVLRALKLYHELGDPKAAELAEKAFEIMAQLRKLYEELARATTPEQFERLYKSARILYVILKAIEVVLRALKLYHELGDPKADELAKQAERIMEKLEELFRELERATTPEQYRRLYLSAEILYVILKAIEVVLKALKLYREAGDPHAEKLARKAETWMKLLQELFARLERATTPEQFEELFKAAKAVAEALAAIEASLKALAAAQ

SEQ ID NO: 2239 - protein, 291 aa, synthetic construct
  REGION 1..291: note = Synthetic
SEVEAEVLVSKIKAVLAKAEAVVATARKLYKKLGDPKAEELARYAEDIARKLKQLLEELARATTPDQFRRLVVSAEILEVILKAIEVVLRALKLYRELGDPKAQELAEKAEDIMRKLQELFEELANATTPEQFERLRVSARILYVILKAIEVVLRALKLYHELGDPKAAELAEKAERIMEKLEELYRELERATTPEQYRRIEVSAEILYIILKAIEVILKALKLYREAGDPKAEALARDAEKHLKMLDKLFKRLERATTPEQFEELYKAAAALAESLKAIEKVLKLLAKTQ

SEQ ID NO: 2240 - protein, 267 aa, synthetic construct
  REGION 1..267: note = Synthetic
SEREILTLLFKLLQAMSSLFKAYVKLAKLRSSSDSEVVETAKRLLENLKRLAEELERMLERIRNSTDPQDLRIAELLVKVAEAIAQLAEAIAKLLELANSSDSSVSETAKQLAELLLRLIEELLKMWERIKNSTDPADLRVAELIVKVALAIALLAAAIAKLLELKSSSDSEVVETAAQLLEALKRLIKELLKMIEKLKHSTDPRDLKIAEAIVRVALTIAKLAANIADLLKAASSSDSTVAAFAKRLAREFKKLIEAFERLIEKTK

SEQ ID NO: 2241 - protein, 267 aa, synthetic construct
  REGION 1..267: note = Synthetic
SEAEIIELLIKVKLAIFKLRAAISQLERLSKSSDSEVKETAKRLAENLKRLIERLKRMLERLANSTDPQDLRIAELIVKIAEAIADLAAAIAKLLELASSSDSAVSETAKQLAEKLQRLIEYLLRMIEKLANSTDPQDLRIAELIVKVAKAIALLAAAIADLLELKSSSDSEVSETAQQLAEKLLKLIDELLKMIEKLKNSTDPRDLAKAEFIVRVAATIAKLAKRIAELLKAASSSDESQAKAAKKLATLLLKLIDELFEALKTKK

SEQ ID NO: 2242 - protein, 224 aa, synthetic construct
  REGION 1..224: note = Synthetic
SEDEAAAAAEALFLVVAALEIIEELGDEKLAKLVKTILKKISEASAAGDEQQIRLILLMARAVLLVAKAFKIIKELGDELLRELVERIVEQILRALEAGDEEQFRLILLMAQAVLLVAQAFKIIKELGDEKLRELVERIVKQILKALKAGDEKQIEKIARMAAAVWFVAVAFKAIKEAGDESLAREVKAIVEAILEALEKGDKKDIVEILARAVQVLINALLTK

SEQ ID NO: 2243 - protein, 297 aa, synthetic construct
  REGION 1..297: note = Synthetic
TEEFFEIFKKLLEVLEKILKMQLKIAAKAKEGDPQAKELYRKIQKLQKLALKALQIIVEALKKGDPEQAEFARILAKALEVYVKVLEMIQKIQELRKEGDPRASELLEQIKRVLALAEKALEQIARAQDEGDPEQAKFAAILAEAVEVFLKVLAMIQKIQELLKEGDPRAKELLEQIKRVLELAEKALEIIERAIAKGDPKQAYFAAILAMLVEVFVAVLEMIQKIQELKKQGDPRAEELLRRIEKVLAQAEEALERIERAQKKGDPRDANKAALLALDVALKVAKLSAATVNQKTK

SEQ ID NO: 2244 - protein, 298 aa, synthetic construct
  REGION 1..298: note = Synthetic
SEELKKMALAAFEIAEEALKAAKEVHAEVKKKGGERAKEFAERFQKIATKILKLIEKILKSAEEGDPHKVALLLMIVKALQILLEALKLLLEVLKDVETFGGERAKEFLRRFEKIWEKIERLIKQIERSAAAGDPRAVALLLMIVEALKILLEALAALLKVYKYYEKFGGEEAEEFLRRFTEIWEKIERLIKKIEKAAAAGDPKQVKLLLAIVQALAILLKALEYLLEVLAYFETFGGEEAEEFLRKFKEIWEKIKRLIKKIEESAAAGDPRRVEKLWWAVLKLALELLKLAFKLSKA

SEQ ID NO: 2245 - protein, 298 aa, synthetic construct
  REGION 1..298: note = Synthetic
SEELLKMVLEAAKIAQEASEALKKVKKDLEKFGGERAKEFWERFVKIAKTILKLIKKILKSAKAGDPRKVKLLLMLVKALQILLEALEYLLRVFKEVEKFGGEEAKEFLERFKKIWEKIERLIKQIFRSAAAGDPKQVKLLLMIVEALQILLEALQYLLEVYKYYEKFGGEEAEEFLRRFKEIWEKIERLIKKIEKAAAAGDPHQVALLLMIVRALQILLAALKYLLEVLQYFETFGGEEAEEFLKKFKEIWEKIKRLIEKIEEAAAAGDPRRVKDLLAKVAWAAVELTLLHLELSAT

SEQ ID NO: 2246 - protein, 298 aa, synthetic construct
  REGION 1..298: note = Synthetic
SEELLKMLKEAAKIAHEASHALKKVKKEVKKHGGEEFKEFAKRFAKIAKKIVKLIKKILKAAKAGDPRKVELLLMIVQALQILLKALEYLLEILKYYYKFGGERAKEFLQRFKEIWEKIERLIKQIERSAAAGDPKAVRLLLMIVEALAILLEALKYLLEVLKYYEKFGGEEAEELVRRFKEIWEKIDRLIKKIERSAAAGDPKQVWLLLAIVRALKILLAALAYLLEVLQYYKEFGGEEAEEFLRKFKEIWEKIKRLIKKIEESAAAGDPRRVKKLLAKVALAAIELQLLQLELTAT

SEQ ID NO: 2247 - protein, 298 aa, synthetic construct
  REGION 1..298: note = Synthetic
SEELLKMVKEAAKIAHEAAWALRKVQADRDKKGGERAKEFAERFAEIAKTIVKLIKKILKSAKAGDPRKVKLLLMIVQALQILLEALLALLEVLKYFEKFGGERAKEFLERFKKIWEKIERLIKEIEKAAAAGDPKKVALLLMIVEALKILLEALKALLEVLKYFEKFGGEEAEEFLRRFKKIWEKIARLIAKIEKSAAAGDPKKVALLLMIVRALQILLAALLYLLEILQYYRTFGGEEAEEFLRKFKEIWEKIKRLIDAIEESAKAGDPRKVKDLLAKVAFLAVELQLLQLELVAT

SEQ ID NO: 2248 - protein, 298 aa, synthetic construct
  REGION 1..298: note = Synthetic
SEELNTIILEALKILAAAERALEKVKKEVEKKGGERAKEFLERFKRIYEKIKQLIEAIQRSAEAGDPKKVKLLLMIVQALQILLEALLYLLEILKEFEKFGGERAKEFLQRFKEIWEKIERLIKKIEKSAAAGDPKQVKLLLAIVKALQILLEALAYLREVLKYYEKFGGEEAEEFLRRFKEIWEKIERLIKKIEKSAAAGDPKQVWLLLAIVHALKILLEALAALLRVLQYFEQFGGEEAEEFLRKFKEIWEKIKRLIDEIEKSAAAGDPTRVSRLHLEVFKAAIKLKELEQKLQEL

SEQ ID NO: 2249 - protein, 268 aa, synthetic construct
  REGION 1..268: note = Synthetic
TAEDISQVFAKIVEIVEKILKILEKLKRAGDEHSYERAARMLEKALKLLEAALRAFKHNDSDTARILEVIVLILEIILKIIKILEQLKRAGDSESVQRAKEMLEQAERLLEQIFEASKHNDLDTARILKVIVAILDIILKIIQILKQLKDAGDEESYAEAKRMLETALELLKKIEAASAHNDLDTAKILHVIVQILEIILRIIQFLEAVKRAGDESSFEKARRMLEEAARLLEKIKEASDHNDKDTAFKLSLAVMELMATLLKIKVEK

SEQ ID NO: 2250 - protein, 256 aa, synthetic construct
  REGION 1..256: note = Synthetic
SASALAKALEVLARLDQLSEELAKQGDEELRKLIERIAKQLYKALQEAVKTGSEEALEKIKQLNTLAAALEVMKALKELSEELARQGDEELYRLIERIYQQLREAVETFQRTGSEEALKRINALNTLAQALRLMKELKELSEELARQGDEELYRKIERIYQQLREAVERFQKTGSEEALWRIYALLTLAQALRVMKELKELSERLRSQGDEEKYRKIETIYQELREAVDQFQETGSEEALVRILRANAAADELFKK

SEQ ID NO: 2251 - protein, 256 aa, synthetic construct
  REGION 1..256: note = Synthetic
SLEALREAWRVHYELSELSTELARQGDEELLRLIERIAQELRKAIATARKTGSEEAEEKIKAANTLAEALRVMKELKELYEELARQGDEELARLIERIYQQLREAVERYFRTGSEEALKRITALLILAQALRVMKELKELYEELKRQGDEELLRLIETIYQQLREAVQRFQETGSEEALKRILALNILAAALRVMKALKEASERLRKKGDEDKYRKFETIYQQLREAVQQFQETGSEEALFRILNANARAAELFRE

SEQ ID NO: 2252 - protein, 256 aa, synthetic construct
  REGION 1..256: note = Synthetic
SSSALLEAYKVWLELWALSKELAAQGDEELYRLIERIAQQLRKAVQEFEETGSEKALEKIKELNTLAEALRVMKELKELSEELARQGDEELYRLIERIYQQLREAVERFQREGSEEALERIAALNTLAQALRVMKELKELSEELARQGDEELFRLIETIYQQLREAVARFQKTGSSEALKRIAYLNSLAQALRYMKELKELSERLRKQGDEEKYRKIETIYQQLREAVQQYQETGSEEASARIHAALKRAEELQRA

SEQ ID NO: 2253 - protein, 224 aa, synthetic construct
  REGION 1..224: note = Synthetic
SESEAEALARALELVIKALEIIEELGDEKLAKLVKTILKKISEASKKGDEQAIRLILLMARAVLLVAQAFKIIKELGDEKLRELVERIVEQILRALEAGDEEQIRLILLMAQAVLLVAQAFKIIKELGDEKLRELVERIVEQILQALRAGDSDQIEKIARMALAVWLVAAAFKAIKEAGDESLQREVEAIVEAILRALEAGDSKQIVEILKRAVQVLLEALLTK

SEQ ID NO: 2254 - protein, 260 aa, synthetic construct
  REGION 1..260: note = Synthetic
SEEEAKFAARWATWQLRAAQKALEKQGDEKVEKILKALKEELDRMREEAAKDEEWVDKVIKIAEAILLLAAAVSTLVKAREYLARQGDEKAKEILEKLLEELRQMLERRAKDEEWLDKVIQIAKAILLAAQVVIVLVQAKEYLKRLGDEKKAKILKALWEELRQMLERAAKDEEWYQKIIKILKAILLAAQAVITLVAAEEYLRRAGDEEVKELLEWLWELLRQMLEKRAKDEEWLDKVIEIAKRILRAAETVRETVKAQ

SEQ ID NO: 2255 - protein, 246 aa, synthetic construct
  REGION 1..246: note = Synthetic
SEEIKVAEKVFKTALELALTHAKEAGDEEMYKEVEKTRKEFEEKIKNAKDESEIKEILKVFLLLAKFIFLLAAALQLAKEAGDSEMWKEIVETFRALREAIANAKDESEVREILKLFLTQAEFIFLLALALLLAKKAGDEEMWEAVVDTFRKFQEAIRNAKDESQIREILKVYLLQAQFIYLLARALLLAKAAGDESMWEAVLKTFRELQKMIANAKDEEEIKKILKLFLDLAKLSVWKAKWAVEK

SEQ ID NO: 2256 - protein, 246 aa, synthetic construct
  REGION 1..246: note = Synthetic
SAELMTLENEFLAALLEAYVLAKLAGDEEMAEEVEKTRKAFEEKLRNAKDEEEIKEILKVFLLQAHFISALARALLLAKAAGDEEMWKAILETFRAWLRAIRNAKDESQVREILKLFVAQAQFIAALAAALLLAKKAGDSEMWEEVVQTFREFQKALANAKDEEQKRKILKVYLMQAKFIAALARALLLAKEAGDEKMWKEVVETFRQLREAIANAKDEDQVLKILAKFSKRAQKSAYEATLKATT

SEQ ID NO: 2257 - protein, 249 aa, synthetic construct
  REGION 1..249: note = Synthetic
SESEAAAEWFVRWKIKQAFETALEKSTDEKTIKELLQKALEEATRIAQELGLGERWAEELATQAIQEVVKEWIIKAFLAALERSTDERTIKEVLRAAQRIATLIAQRLGLGERQAEKLATEAIAEAVYQWIIELFRKTLEKSTDEQTIREVLAEAFRIAELIAQQLGLGEEWAAKLAITAIMTVVAEWIIKLFREALKRSTDEQTRQEVKEEAYRIAKLIAKELGLGEEVAEKLAKLAISKVETEHAKE

SEQ ID NO: 2258 - protein, 249 aa, synthetic construct
  REGION 1..249: note = Synthetic
SEEQFLAAFDVALAILEKFWKTLKKSTDEKTIKEVLQKAFEEATRIAQKLGLGEEWAEKLAKSAIATVVATFIAYQFKKALERSTDEKTIKEVLRKAQRIATLFAQRLGLGERQAERLATEAIEELIFKWIIELFKRTLDKSTDEQTIREVLREAFRIAELFAQQLGLGERQAERLATEAILEVVFQWIVEKFREALQRSTDEQTKKEVATEAARIALAIAKELGLGEDAALQLALSAFLAVQVAWETE

SEQ ID NO: 2259 - protein, 249 aa, synthetic construct
  REGION 1..249: note = Synthetic
SKEQFLALFKVALKILEKFWKALKKSTDESTIKELLQQALEEATRLAQELGLGERAAEKLAATAIATVVATFIAYQFKKALERSTDERTIKEVLKKAQRIATLFAQRLGLGERQAERLATEAIEEVVFQWILELFKKTLEKSTDERTIAEVLREALRIAQLFAQQLGLGEEQAKRLATEAIQEVVFQWLVEKFREALQRSTDEQTKKELATEAAEIALAIAKELGLGEEAALQLALSAYLAVLVAWETE

SEQ ID NO: 2260 - protein, 249 aa, synthetic construct
  REGION 1..249: note = Synthetic
SESEFKAAFAVAVAILEKFWKTLLKSTDEKTIKEVLQEAKEEALRIAKELGLGEEWADKLAQSAIATVVAAFIAYQFRETLKKSTDESTIKEVLKEAQRIATLFAQKLGLGERQAERLATEAIEEAVFQWIIELFKEVLRKSTDESTIAEVLREALRIAILFAQQLGLGERQAERLATEAIQEVVFQWIVEKFREALQRSTDEETKKEVLAAAAEIALMIATELGLGEEAALQLALSAILAVLIAWETE

SEQ ID NO: 2261 - protein, 249 aa, synthetic construct
  REGION 1..249: note = Synthetic
TESELTAALKVALAILEKFWKTLKKSTDEDTIKEVLQQALEEALRIAQALGLGEEWAESLATHAILIVVAAFIAEAFKETLARSTDERTIKEVLRKAQRIATLFAQWLGLGEDQARRLATEAIEELVFQWIIELFKRTLAKSTDEQTIAEALREALRIAQLIAQQLGLGERQAERLATEAIQEVVFQWIEEKFREALERSTDEQTEKEVVEAAAKIAAMIATELGLGENAALHLALKAFLAVRIKWEKK

SEQ ID NO: 2262 - protein, 249 aa, synthetic construct
  REGION 1..249: note = Synthetic
SEEETKELLKVAVAILRKFTETLKKSTDEKTIKEVLQKAFEEATRIAQALGLGEEQAERLATHAILTVVAAFIREQFKETLERSTDERTIKEVLREAQRIAELIAQRLGLGERQAERLATEAIEEAVFQWIIELFKRTLKKSTDEDTIKEVLKEALRIAELIAQELGLGERQAERLATEAIQEVVFQWIIERFREALQRSTDEQTDKELLTEAATFAALIAQELGLGEQWALQLALAAIYTVEQEWEKE

SEQ ID NO: 2263 - protein, 249 aa, synthetic construct
  REGION 1..249: note = Synthetic
SEDEEKKRAKVHFAIFEKFWEALWRSTDEKTIKELLQEALEEATRLAQALGLGEREAEKLATNAIAMVVYAFIMAQFLKTLAESTDEKTLKEVLREAQRIANLFAQYLGLGERQAERLATKAIEAVVFKWIVELFKRALEKSTDESTIKELLKEALRIAQLIAQELGLGERQAERLATEAIQEVVFQWIIEKFREALERSTDEQTKAEIHNEAFRIAKLIAKLLGLGEDQANELAAAAIAHVLADATVK

SEQ ID NO: 2264 - protein, 244 aa, synthetic construct
  REGION 1..244: note = Synthetic
DEEFKTLLKLAKEHVKKAEDHAGTDPSLQEMVKTIKKELEQAERTWRNGDKEEAKKQLLFVATAAHAVLLVAQAAETAGTDPELQEMVKRILELLKEAIKTFQNGDQEEAERILRFVATAARAVLLVAQAKNTAGTDPELQEMVARILEELKQAIETFKRGDQEEAERQLRFVLTAAQAVLLVAQAKNTAGTDPRLQQQVKEILEKLKAAIAIFQSGDQEAALYLLEVVLQEAEAVLERAKKTR

SEQ ID NO: 2265 - protein, 249 aa, synthetic construct
  REGION 1..249: note = Synthetic
SAEAFDKALEFYKRIIKKFKETLTRSTDESTIKEVLQQALEEATRIAQELGLGEEYAKWLAARAIQEVVKEWIYEIFKETLEKSTDEKTLKEVLKTAQRIATLIAQYLGLGERQAERLATEAIEEVVFQWIIELFKRKLKESTDEKTIAEVLREALRIAELIAQQLGLGERQAERLATEAIQEVVFQWIIELFRESLARSTDEQTKKETISEAWRIAALIAKELGLGEKKASELALKAIEKVEREWEEE

SEQ ID NO: 2266 - protein, 302 aa, synthetic construct
  REGION 1..302: note = Synthetic
KKEKEEEIATTLLRIRVLLSLLKYAAEQANDEDLSEEIKESLEKIEKLMRKAEQLFRAAEAAGDPRLAEKALKVLRIAWWIAKITLLLIELRQNARQANDEDLSKKIQKSFEKIKQLMEKAIRLFEAAEDTGDPRNLDKALRVVRIAWWIAKITLILIELRQAAKQANDEWLAKKIQESFEKIEELMEKAKKLFEQAEKTGDPRLFEAAFLVVRIAWWFAKITLLLIELWQRARQANDEELARHINKSFEEIERLMEKAARLFDAAEETGDPRLLEKALRVLKYAAAVAKSTLKQIEMAQRT

SEQ ID NO: 2267 - protein, 302 aa, synthetic construct
  REGION 1..302: note = Synthetic
DKEKEEEIETWLLRIRVLLSLLAYAAEQANDEDLSKEIQESFEKIEKIMRKAEQLFRAAKETGDPRLLEYALLVVRIAWWIAKITLLLIELRQAARQANDEDLSKKIKESFEKIKQLMEKAIRLFEQAEKTGDPRLLEKALLVLRIAWWFALITLLLIELRQAARQANDEELSRKIQESFEKIEKLMETALRLFDEAEKTGDPRLLEKALLVLRIAWYIAKITLLLIELWQAARQANDEELARRIQKSFEEIERLMEKALKLFKEAEETGDPRLLEKALRVVVYALELAKSTLKQIEMAQKT

SEQ ID NO: 2268 - protein, 252 aa, synthetic construct
  REGION 1..252: note = Synthetic
KEDEFTKLLRKLNELLLALAKAAEEEGDERIKTLAAKVLELLKKARELAKAGNLEKALKTLAVATLLLEALLLLIELKRAYKQTGDERIRELVEKVEKLLEKAFKLYEAGNDEEALKTLKVATQLLRALKLLIELKRKYAKTGDSRIAEIAKKVAELLEKAFKLEAAGNLEEALKTLKVATALLKALKILAELKEAYEKTGDEKIRKIAEHVRRLLEKALKLYEAGNLERALKTLDEAYQQLSNSLMEALEK

SEQ ID NO: 2269 - protein, 256 aa, synthetic construct
  REGION 1..256: note = Synthetic
TETEIKAFIKRAQFAIHLASYHASLTGSERLRALVAQAQKLVEEVKRSFAQGNMEDVLKQARIALLIAQAIAYIARAYTIAKQFGSEELRQLVEMAARLVEEVYKSLKQGNLEEVYWAALIALAIARAILYIAQAWALAKLTGSEDLQELVRMAIALVKEVFASYKQGNKEKVYDQALIALAIAQAISYIAQAYAIAKRTGSEELKKLVKEAIETVKRVFASYKQGNMERVYEQAAHALAVATWISLTAAAAEKKK

SEQ ID NO: 2270 - protein, 256 aa, synthetic construct
  REGION 1..256: note = Synthetic
TEREIKYLIAEAQFAIHLAEYHAKRTGSEQLRKLVRQAQALVEEVKESFKQGNMEDVLKQAKIALFIAQAIAYIAHAYAIAKATGSEELRQLVEMLARLVEEVYKSEKQGNMEEVYWQAAIALAIARAIAYIANAYLLAKITGSEDLLALVRMAIALVKEVFASFKQGNEEKVYWAALIALAIAQAIYYIALAYKIAKDTGSEELKKLVKEAAELVKRVWKSYKQGNMERAYEQAAHALAFANWILLVARAAELRR

SEQ ID NO: 2271 - protein, 256 aa, synthetic construct
  REGION 1..256: note = Synthetic
TETQIKVFILLAQYYIYLAALIAKETGSEQLRKLVRLAQALVEEVKRAYAQGNMEDVLKQARIALFIAQAIYYIALAYKIAKETGSEELRQLVEMAARLVEEVWKSLKQGNLEEVAHQAAIALAIARAIAYIAKAYKIAKETGSEDLKELVRMAAAFVREVFAAFKQGNLEEVYWAAFIALAIAQAIAYIAEAYKIAKETGSEELKKLVKEALELVKRVWKSYKQGNKERAAEQAMKALAFAVKIAETAKKTKKDK

SEQ ID NO: 2272 - protein, 251 aa, synthetic construct
  REGION 1..251: note = Synthetic
SEEFRLLFAHADWLAMVILAIAIATGSEEIQELFERVETAIKEVKEESKKDKEKAKQKLEFIVLLARAILLAAYIYFIAATTGSEEIQELFEQVVEAIKRVIAESKKDKEEAYKALLFIYALAVAILLAAKIYAIAQKTGSEEIQKLFEQVVEAIKRVREESRKDKEKAFKKLEFILTLAQAILLAAKIYEIAQETGSEEIKEKFKDVVKQIERVREESKKDKEEAKRQLKAILFKAWLILLEAKHYKMRQ

SEQ ID NO: 2273 - protein, 251 aa, synthetic construct
  REGION 1..251: note = Synthetic
SLEFEAALMKAHALAVLIAAIAKRTGSEEIQELFEQVEKAIKEVEEESRKDKEKAKQKLEFILLLAHAILLAAKIYEIAQRTGSSEIQELFERVVEEIKRIYAASSKDKEKAKRALEFILLLARAILLAAKIYEIAQRTGSEEIQRLFEAVVREIKKVRAESSKDKEKAHRALEFILLLAKAILLAAKIYEIAQRTGSEEIKKLFKKVVEYIERIIKASSKDKEEAKRALEKILEFAKAILTNAKAQEAAQ

SEQ ID NO: 2274 - protein, 255 aa, synthetic construct
  REGION 1..255: note = Synthetic
TEELTKKMREAESLLLHILVAALKKGDKQLMELLKIIHALIAELKELKAQGDSEEADRTVELILTMARAVLLLAKISATAKELGDEQLKELVQEIWKLIKELAELFRQGDHKKAKDTAALILAMAHAVLQFAEIAKAAKEQGDEQLKELVQEIFELIKELAELLRQGDAEKAKDTITLINLMALAVNLLAALSTAANKTGDERLKEQLQEIFKQIKKLAELFKQGDAEQAKRTLEKIFEQALKVLFDALESYLAR

SEQ ID NO: 2275 - protein, 244 aa, synthetic construct
  REGION 1..244: note = Synthetic
DEEFKFLATEAKMLITAAERAAGTDPELQEMVALIKKELEQAERTFRNGDKSEAQRQLEFVLTAARAVLLVALAASVAGTDPELQEMVDRILKQLKEAIRTFQNGDQEEAETQLRFVLRAARAVHLVADAKLAAGTDPELQEMVKQILEELKQAIETFARGDKEKALTQLLFVAWAAEAVALIARAKNTAGTDPRLQQQVKEILEKLKEAIETFQKGDEEQAFRQLAEVYAEAHQVLLRAKKTN

SEQ ID NO: 2276 - protein, 255 aa, synthetic construct
  REGION 1..255: note = Synthetic
SEELTKLYLEAMELFYKIQKTAAETGDEDLQELVAIIKELIDKLAELIAQGDEEQAKRTIELILTMARAVLLVAEISRLAKETGDEQLKELLKEIFRLIKELAELLRQGDTDKAKKTLELILAMAKAVLLLAKLSKTAKEQGDEQLKDLVQEIWELIKELAELAAQGDLEKAKKTIALILAMAKAVLAVAKISTLAKETGDESLKKQVQEIWRQIKELAELIRQGDYEQATRTVLEIMVQALKILLEALESKQKK

SEQ ID NO: 2277 - protein, 255 aa, synthetic construct
  REGION 1..255: note = Synthetic
SEIEFLYTLSQAKLAVLRAKAIATETGSEELRELLELIEKEIKEVERAWKQGNKEEAQKAAEFVLTLARAIWYVAQAYKLAQETGSEELKQLMKLIVEEIKRVFESWRQGNKEEAAKQAEFVLTLARAIWYVAQAYKLAQETGSEELRELFELLVKEIQKVFRTWQQGNKEKARRAALFVAILAQAIWAVAVAYKLAQETGSEELFRQFEQIVREIKAVFESWAQGNEEDAFKQALTVLLKAFKIALEAKLQKSK

SEQ ID NO: 2278 - protein, 255 aa, synthetic construct
  REGION 1..255: note = Synthetic
SEIEFLYTLAQAKVAVLLAKFIAKQTGSEELKELLELIEKEIKEVERSWAQGNKEDAQKEAEFVLTLARAIWYVAQAYALAQETGSEELKQLFKLIVEEIKRVFESWRQGNKEKADKQAKFVLLLARAIWYLALAYKLAQETGSEELRELFELIVKEIQKVFRTWQQGNEEKARNAALFVASLAQAIWAVAQAYKLAQEIGSEELFRQFEQIVREIKAVFRSWQQGNEEDAFKQALTVQYKAFKIAAEAETQKKK

SEQ ID NO: 2279 - protein, 255 aa, synthetic construct
  REGION 1..255: note = Synthetic
SEIEFQYTLALAKVALLHAKTLAKQTGSEELRELLELLEKFIQEIERTWKQGNKEEAAKAAEFVLTLARAIWYVAVAYKLAQETGSEELRELFELIVEEIKRVFKSWAQGNKERAQKQAEFVLTLARAIWYLALAYKLAQETGSEELRELFELIVKEIKKVFEEWRKGNEEKALAAALFVLILAHAIWAVAQAYKLAQETGSEELFRQFEQIVKEIKAVFRSWQQGNEERAFEQALTVMYKANKIAAEAKTQKEK

SEQ ID NO: 2280 - protein, 255 aa, synthetic construct
  REGION 1..255: note = Synthetic
KEEEFKRTLERAKEYLWAALWLASQTGSKELWELAKLLLEEIKEVERSWAQGNKEEALKQAKFILTLARAIWYVAQAYKLAQETGSEELRELFELIVEEIQRVFRTWQQGNKEEAQKAAEFVLTLARAIWYVAAAYKIAQQTGSEELKELMELIVKEIQKVFRSWQQGNKEEAQKAAEFVLTLARAIAALAVAYNLAQRTGSEELKRQFEQIVREIKAVFRTWQQGNRERAKEAADEVLKRAYAIAFEAFEQTID

SEQ ID NO: 2281 - protein, 283 aa, synthetic construct
  REGION 1..283: note = Synthetic
SEEEAKVWFTASEATVAIDLAYYTAAAMGDPRYLRVAEILKKLLEQAKRTLEEAKRAGDEEAFRQATEFIKVIKAAAEAALLVVKAYAAALAMGDPRYLRVAEILLELLIQALETLERARKAGDEDAFKKATRTIKVIKTAAEAALLVLKAYRIAQELGDPRYLEVAEILLELLIEALETLQRAREAGDEAMFAKAALTIAIIAMAARAALLVLKAYKEAVEMGDPRYLEEAEKLLEKLIKALRTLQEAREAGDEKQFLEAVQTIYHIYVEAVRALEKVKAQR

SEQ ID NO: 2282 - protein, 268 aa, synthetic construct
  REGION 1..268: note = Synthetic
DEEEKSQMALAVTFAKMAAKYAEELAKRAGDEEAKKLIEIVKKLLKEIEEKAKSGDEETFERARQYADMILAVAMALFLALEAYEIAEKAGDEEALELIKRVIQLLLEIVEKSASGDEETFERAVRYAKMIYTVAKAVLLALQAYELALRAGDEDARKLIAIVIQLLLEILAKSASGDEETFERAVRLAKMISTVAKAVLLALQAYELAKRAGDSEAEKFIKMLIKSLTAIVEKARSGDESTFEKALRAAKKIAELAQFVLELLQRAE

SEQ ID NO: 2283 - protein, 268 aa, synthetic construct
  REGION 1..268: note = Synthetic
SEEEKEKMETTVRKAEFAAKLAEALAKKLGDEEAKKLIAQVKKLLKEIKKKAASGDSETFERALAYAKMISTVATAVFLALSAAVLAYKAGDEEALELIKRVIELLLEIVEKAASGDEETFERALRFAEMILTVAKAVHLALEAKEIAERLGDEDARKLIEIVIQLLLEIVAKAASGDEETFERALRLAEMIATVAKAVLLALQAYELAKELGDEDAERFIEALIKALVEIVEKSASGDEDTFKAALKKAKEIAFLAEMVYEYLKSAK

SEQ ID NO: 2284 - protein, 268 aa, synthetic construct
  REGION 1..268: note = Synthetic
REEETAHMRLAVTLAKIAAEMAEEAAERAGDEEAKKLIKIVKELLKEIEKKAKSGDEETFERALAFAEMILTVAQALFSALLAYEIARRLGDEEALELIERVIKLLYEIVAKAASGDEETFERAKRLAEMIATVAQALLMALLAKLLAEKLGDEDALKLIAIFIQLLLEIVAKAASGDEETFRRAKKFAEMLATVAAAVLLALLAYELALALGDESALRKIKALIKKLVEILEKAASGDEETFLKLLAKAFKIYNEAEVTYVQLILKA

SEQ ID NO: 2285 - protein, 268 aa, synthetic construct
  REGION 1..268: note = Synthetic
REKEAKKMELAVLLAKLAAKMAEELAKRAGDEEAKELIEIVKKLLEEIEKKLRSGDEETFERALQFAKMILTVAQALFSALLAYEAARRAGDEEALELIKRVIQLLTEIVKKAASGDEETFERAKRLAEMIATVAQAVLMALLAAFHATKLGDEDARKLIEIVIQLLLEIVAKAASGDEETFERAAAFARMISTVAKAVFLALQALELARAAGDEEAERKIKRVIKKLVEIVEKAASGDEDTFIKALALAFAISNEATVIYVQLLLKK

SEQ ID NO: 2286 - protein, 244 aa, synthetic construct
  REGION 1..244: note = Synthetic
DKEFESTATIAKILVKAAEKAAGTDPELQEMVALIKKELEQAERTFRNGDKREAERQLKFVLLAAKALFLVAHASNLVGTDPDLQEMVKLILEQLKEAIRTFQNGDQEEAERQLKFVLKAAQAVSLVAQAAAVAGTDPELQEMVKQILEELKQAIKTFKQGDQEEAERQLDFVLTAAKAVLLIALAKNTAGTDPRLQQEVKEILEKLKEAIETFQKGDQEAALRKLFAVALEAEEVLSQALRTN

SEQ ID NO: 2287 - protein, 282 aa, synthetic construct
  REGION 1..282: note = Synthetic
SETEKTIASAMEHALKSLLKAVLADASKAGDLEAIFEAVQKILEYILKEAEKAAKKAGLSPEQTRRILERLILIAMLEALKAALAVVLQSAKEAGDLEKIFRKVEEVLRRILEQAERNAKKAGLSPEQTRRILETLILIAMLTALKIALEVVLAEAYRAGDLEAIFTLVEEVLARILELAERLAKDAGLSPEQTRRILEALILTAMSTALQIALAVNLTKALKAGDVESIKKLVEEVLERILRLAKATAEKAGLSPEQIKYILYVLKVQAEAAAYVALAKLR

SEQ ID NO: 2288 - protein, 274 aa, synthetic construct
  REGION 1..274: note = Synthetic
KEEAAKMVLYFLTLLLAHFLARAKKESGGDAQRLEELAKWLLELALKLAKEFMERLGITDETLKRLLAAIVLSFLTLFVRSLLEWFKKASGGDLQKLKEQAERLLKKALKQAEETMKKLGITDSTLKRLLAAIVASALWLFVAFLLEVFKDASGGDADKLQKRIEQLLKKALELAEELMKQLGITDDTLKKLLAAIVAYALLQLLITLLELFYKASGGDKEELKRQAERLLEEALRQAEEIMKKLGITDSTLEWLLTLIKMLAKFLMKLLLYLA

SEQ ID NO: 2289 - protein, 270 aa, synthetic construct
  REGION 1..270: note = Synthetic
DEEIKETYEQIAFLVFKAQLILLSLFSSDSSDIRETLEEIQKLLQEILRLAKEALKRGDKEKLEIALIMVKIAWLVAQATAILQKLASSDSDEIRTFIKQILKLLKEVLRLAKEAAERGDKDLLAIALIMVQIAYLVAQAALILEELKSSDSQEIRELIERIERLLHEVLRLAKEAAERGDKDLLAIALIMVKIAWLVAAATKALEELKKSDSQEIREKLERIWRLLKEVLELAKEAAERGDKELLEKALAKVMEAALQAVHTLLEAEQA

SEQ ID NO: 2290 - protein, 270 aa, synthetic construct
  REGION 1..270: note = Synthetic
SEEIKAAADAIELLVKLAEEALADLKRSDSSAIKKTLKEIEKLLKEIQRLAEEALKRGDKKKLEIALIMVEIAFMVALATMALANLKDSDSQEIRALIEQILRLLLEVLRLALEAAKRGDKDLLEIALIMVRIALLVAEATLALAQLKSSDSDEIREFIERIERLLHEVLRLAKEAAERGDKELLAIALIMVEIAWLVAQAALILEALKRSDSQEIREAIERIERLLKKVLELAKEAAERGDKTTLTIALLLVRFAWYKARLTLYNAEQQ

SEQ ID NO: 2291 - protein, 270 aa, synthetic construct
  REGION 1..270: note = Synthetic
SAEILLAWQHIASLVFEALLILMKLKSSDSQQIRKTIEEIEKLLKEVLALAKEAVKRGDKSTFELALIMVQIAWLVAAATLILQALASSDSDEIRKFIKEIFKLLEEVLRLAKEASERGDKKLLEIAATMVEIAYMVAVAALILERLKSSDSDEIRETIERIERLLEEVLRLAKEAAERGDKNALAIAYAMVSIALIVAKALEALEQLKSSDSQEIREKIERIERLLKKVLELAKEAAERGDKELLRKASEQVLTAALQAFATLKEAREQ

SEQ ID NO: 2292 - protein, 270 aa, synthetic construct
  REGION 1..270: note = Synthetic
DEEVKTTYLEIAAMLKYAEELLKQLKSSDSQQIRDTLAEIEKLLKEVKRLAEEALKRGDKEKLKTALIMVQIAALVATATLQLARLKASDSQEIRSTIEEILDLLREVLRLAKEAAERGDKTLLEIALIMVKIAVLVAAATQILAKLQSSDSDEIRETLERIFRLLHEVLRLAKEAAERGDKKLLEIALIMVKIAWLVALAVQILEELASSDSDEIKEKLERIWRTLKKVLELALEAAKRGDKKTLYEAAADVRIAYLTAHLTKLEQEYK

SEQ ID NO: 2293 - protein, 270 aa, synthetic construct
  REGION 1..270: note = Synthetic
SEEIQEIAEKIEELVLEAQMALLWLFRSDSQQIRETLTEIHKLLTDIQKLAEEALKKGDKEKLEIALIMVQIAVLVAKATAILQELKRSDSDEIRATIERIFRLLKTVLKLAKEAAERGDKDLLAIALIMVQIAYLVAKATKALEELKSSDSQEIRETIERIERLLAEVLRLAQEAFERGDKELLEIALIMVKIAALVAAATAALALLKSSDSDEIREKIERIERLLKEVLELAKEAAERGDKETLKKAYKKVAEAVNQASHTLFEAEKQ

SEQ ID NO: 2294 - protein, 270 aa, synthetic construct
  REGION 1..270: note = Synthetic
SSEVEHAYLNIELLLREAEDILAQLKRSDSEDIRRTIREIEKLLKEIQRLAEEALKEGDKRKLEIAAIMVQIAVLVAKATAILARLAASDSQEIRKWLEQIFRLLEEVLRLALEAAKRGDKKLLEIALIMVQIAYLVAAALEILEELKRSDSQELRETIERIERLLEEVLRLAKEAAERGDKDLLAIALIMVQIAWLVALATKILEELKSSDSQEIRSAITIIEKSLAEVLELAKEAAERGDKEALEKALRTVKSAWKLAALTKTLQERK

SEQ ID NO: 2295 - protein, 275 aa, synthetic construct
  REGION 1..275: note = Synthetic
DEELEAKARKIKYTLKNAEWILKRIEEKNRGDEKMEKIVELAQRILEQVKEILKEARERGDPRLFELAETAAAVVNALAAAFALLTRIRSANRGDEQMKEFVELALEILRQVLEILKEAIERGDPRLLELAKTAADVVALLARAFLLLTRIRQANRGDEQMEKIVELALAILRQVLRILKEAIERGDPHLLELAWWAAQVVYLLAQAFLLLTRIRSENRGDEDMEELVETALETLRQVLKKLKEAIERGDPRLLREAYKQAQEVYENAVTNAEAT

SEQ ID NO: 2296 - protein, 294 aa, synthetic construct
  REGION 1..294: note = Synthetic
HSELSSLLLAVTYMAIAVAFASKELQELYERHGDEQAARLFETIQQLFEAALELAERANNVSEEQAKKYLELAYLLLKVAAMLRKVLALLRELARLWKQHGDERAKRLFETIKALFEKALELAKRARNVSEEQALKYIRLAAALLTVALMLQKVLELLEELQELWERHGDEQAARLFETIKQLFEKALELAKTAANVSEEQALKYLSLAAALLTVAELLRKVLELSRELQELYERHGDERAARLFKTIQELFETALELAKAAVNVSEDQAFKYINKAMQALVAALALVEFAKRE

SEQ ID NO: 2297 - protein, 223 aa, synthetic construct
  REGION 1..223: note = Synthetic
TENNLASAKAAAKKAEEAAKKAGDPKAKKLVELVKKRIEEAERAGDERKIEKIQALAYALAAALAALLMAQELGDPKLKEAVELVLERIIEALEAGDDRKIEQILLMAAALAYAAKAVKLAQAAGDPKLKKAVELVLERIIEALKKGDERELQKILTMARALYYAAAALRKAQEAGDPDLLKAVEAVLEKIIRALEAGDEKQIEEILENAKRVAEFADLAKTI

SEQ ID NO: 2298 - protein, 299 aa, synthetic construct
  REGION 1..299: note = Synthetic
TEWELTVAKFLAHLLRLLLKKLKKKAESASDEQKQREWRALIELLEKLLRKVLEKMEEAEKTGDPRKLKTVLRLIKAVYLALQAAKLLFELFERAESASDESTQREDRKLLETLRRLLETVLRKMEEALKSGDPRKLETLLRLIKAVYLLLQAARLLQELRKRAESASDEEKQRRDRKIIETLERLLKKVLEEMERALKSGDPRDLETLLLLISAVYQALQAARLLQELRAAAESASDEQTAREDLKIIEELERRLQEVLEEMERALKSGDPRDLTRVYLEINKVALALLLAQYEQELR

SEQ ID NO: 2299 - protein, 299 aa, synthetic construct
  REGION 1..299: note = Synthetic
SEWELAEAKALLTALDQLLEKLKKQAESASDEQKAREDRAIIETLEKLLRKVKEKMEEAEKTGDPRKLATVLRLIRAVFLLLQAAQLLLILEKRAESASDEQTQREDRKIIETLRRLLEIVLRKMEEALAEGDPRKLETVLRLIKAVYLALKAAETLQELRKRAESASDEEKQRKDRKIIETLVRLLATVLEQMERALKSGDPRDLETVLFLLRAVYAALQAARLLQELREEAESASDEQTQREDRKTIEELERRLQAVLEEMERALKSGDPTDLARAFAAILLVALELEIAKAERESR

SEQ ID NO: 2300 - protein, 224 aa, synthetic construct
  REGION 1..224: note = Synthetic
DESLKHQATLFTKALERLAKIFTSEEVRELIKKLQKEAEEAARAGDESRLHQLVFLAILLTYVFKLLKKLLEMFTSEEVRQLIEELLRQALEAALKGDEKRLAALVALATVLTTFLELLKKLAEMFTSEEVRQLLKELLRQALEAALKGDYERLVELMELAKLLTALFETLKKLEEQFTSEEVRQFIEELRRQALEAALKGDWARLLALVLLAKANATVSKEKQ

SEQ ID NO: 2301 - protein, 224 aa, synthetic construct
  REGION 1..224: note = Synthetic
TEELRTLLFKLLAYLLVLLLQFTSEEVRELIEKLWTEALEAAKKGDSERLEQLVRLAALLTKFLTLLANLAKLFTSEEVRQVLAELFRQALEAALAGDMSRLEELVRLAELLYLLWVALALLARMFTSEEYKKLIAELLRQALEAALKGDSKRLAELAYLAVALVSLAAALKKLEEMFTSEEVRQEIEELRRQALEAALKGDEERLTQLAEEANTQTKERKKRQ

SEQ ID NO: 2302 - protein, 271 aa, synthetic construct
  REGION 1..271: note = Synthetic
SELHKEIFKVLLAIAEIILKLLQEKVERLGDEKAQRIIEKLAKIFEEAKEEFERMKRNGNIEEALQLLKFVLTALKAALLYLELVELVRRTGDEKAKRIIEKLLAILEQALEKFAQAKRNGNIEEAQKLLKFVILALKAAKLYLELKELVERQGDEQAERIIQELLDILEEALEAFQKMKRNGNIEEAQKLLEFVILALKAAKLYLELVELVRAKGDEEAKEFIKKLLKFLQKALEWFKQAKRNGNIESAQEALKAVLEALKALKRKLEAT

SEQ ID NO: 2303 - protein, 271 aa, synthetic construct
  REGION 1..271: note = Synthetic
EESKKTKFEAAAKAAQTMYETLQEKFERTGDETAKRIIKKLQKILEEAKEEFERKKRHGNIEEALQLLKFVNLALQAAYIYLLLATLLKKVGDEKAERIIKKLLEILEQALEAFAKMKRNGNIEEAQKLLKFVIAALKAALLYLELKSLVKRTGDSEAEKIIAELLAILEEALKKFQKDKRNGNIEEVLALLEFVIAALKAAKLYLELVEKVRAKGDERAAEFIKRLLRILQEALEKFKKAKRNGNIQTALAILQYVLNALKDADVKLEVK

SEQ ID NO: 2304 - protein, 262 aa, synthetic construct
  REGION 1..262: note = Synthetic
DEEQKETSKKVEEYIEAAAQIIQVIKTMGADEELAKQLEESLRRIVKEYAEVAASGDPRDFEKILTSAQVLYYIVQAALNIALIKKAGADERLAEKLEKLLQQILRAFAEVLESGDPRDFEKILTSAQVLAYIVYAAHIIAAIKQAGADERLAEKLEESLEQILRQFEEVERSGDPRDFERILTLAQVLAKIVYAAYIIAKIKQLGADEQLARELAASLQKILEEFKRVRKSGDPRDFERILRQAEELALEVTLAALAAEKK

SEQ ID NO: 2305 - protein, 262 aa, synthetic construct
  REGION 1..262: note = Synthetic
SEEAKVILAVVKVALLFLKLLASALQATGADSELAKKVEELYEKLKKEFEEVARAGDPRKLTQVLIAAAVASALAELAAIAAELKAEGADSRLAAQVAELFQQLLEQFDEVRKRGDPRKLEQVLISARVATALARLALIAARLKKAGADSKLAEKVEELFEQLLKQFEEVQTKGDPRELERVLIAARVAEALAKLALIAAKLKKTGADSRLAAEVEKLFDTLLKLFETVLKTGDPTMLKIVQEFAHQALLFAELALAIAEKK

SEQ ID NO: 2306 - protein, 262 aa, synthetic construct
  REGION 1..262: note = Synthetic
SEEQERIKKEVKTALDFLSQLATALKKTGADSSLAAKVEELFEKLKKAFEEIARAGDPRLLEQVLISARVATILAKLAVAAAMLKLRGADSRLAAQVEELFQKLLEQWEEVRKAGDPRLLEQVLISARVAAALARLAVIAAELKQEGADSELAALVEELFEQLLRQFEDVAKKGDPRKLEQVLISARVATYLAKLAKIAAALKAMGADSKLAEEVERLFRELLETFERVLKAGDPRLLTKVLTAAKLAAFNAEMALTAAKAK

SEQ ID NO: 2307 - protein, 291 aa, synthetic construct
  REGION 1..291: note = Synthetic
SEEEKKRARKAEVLAKLVEILMDAIRKSVKRFGMPEKFEKILELAQKLVEQVEETIEEVKKKGDYQEIEKLIRALEAILLALKVLWLMINILLSLDKFGMPESYKKILELALELVEEVLRTIEEVLRQGDYREIEWAIRALEAVLLALKVLELMIEIAEQLDKFGMPESFKEILELALRLVLQLLETIKRLREKGDYKEIEKLIRALRAVLLALKVLKLMIQIKELAEKFGMPEEIKERLDRALKEVLKTLKTIEEILRQGDYERLEKAALDLTLLLAKLKALEQKIKSAA

SEQ ID NO: 2308 - protein, 223 aa, synthetic construct
  REGION 1..223: note = Synthetic
SSAQAAAARWAAEYAEELARKAGDPKLLKVVALVKKRIEEAERAGDSRKIHKISIMAMAVAAAAQAVLLAQKAGDPKLKEIVELVLERIIEALEAGDEEKIELILLMALAVWYAAAALLLAQAAGDPKLVKAVELVLERIIEALKAGDKRKIEQILLMARALYYAAAALLLAQEAGDPKLRALVEAVLAMIIRALEAGDESQIEHILWVATMVAFLAQLAKEK

SEQ ID NO: 2309 - protein, 291 aa, synthetic construct
  REGION 1..291: note = Synthetic
SEEEKTRARKAEVALKLVEILMKAITYSLKRFGMPEKYEKILALAQAIVEKVEEKIEETKKQGDYKEIEKAIRALEAVLLALKVLLLMINITASAEKFGMPEKIKKILETALQLVAEVLKTILELLEKGDYKDIEWAIRALEAILLALKVLKLMIEIHEKLRKFGMPESFDKILELAWRLVAEVLETIKRVREKGDYQEIEKAIRALRAVLLALKILKLMIDIHEAAEKFGMPESIKERLKEALKQVLRVLATIEEVRRQGDYKRLTKAALELTLILAKLKALEQMIKSAA

SEQ ID NO: 2310 - protein, 291 aa, synthetic construct
  REGION 1..291: note = Synthetic
SEEEKRRARKAEVLAKLVEILMEAIKQSLKRFGMPEKFDKILELAQKLVEQIEEAIEETKKQGDYKEIEKAIRALEAVLLALKVLWLMINILAAAEAFGMPEELKKILELALQLVEEVLRTIEEVRRRGDYQEIEWAIRALEAILLALKVLKLMIEIKEAVEKFGMPETLDKILELAYRLVLKLLETIKRIREKGDYQELEKLIRALRVVLLALKILKLMIEIKEEAEKFGMPEEFAERLKEALKQVLEVLKAIEEILDKGDYERFEELALELALVAAKLKALEQKIKTTK

SEQ ID NO: 2311 - protein, 291 aa, synthetic construct
  REGION 1..291: note = Synthetic
SEEEETRARKAEVAAKLVEILMKAIKHAAKRFGMPEAFDKILELAQKLVEWVEEKIEEVKKKGDYQEIEKAIRALEAVLLALKVLHLMINITAALEAFGMPESYKEILEIALQLVEEVLRTIEEVLKRGDYKEIEWAIRALEAILLALKVLKLMIEIAAQLKKFGMPESFEEILALALRLVLQVLETIKRVREKGDYQEIEKLIRALRAVLLALKVLKLMIEILAEAEKFGMPEKFKEELAEALKQVLRVLETIEEVLKQGDYHRIEKLALELALILAKLKAKEQAIKSSE

SEQ ID NO: 2312 - protein, 254 aa, synthetic construct
  REGION 1..254: note = Synthetic
DEKLKALRTLVELAIELIKELMKKLYKQKNDEQVKEFIKTIKELIKIAEELAKSKDPRDAELALIIAKVALLILNIFEKMAKLAKELNDEQVRETLRTIQELIEQAARLAKSKDPRDAELALIIAQVAKLILDIFEKMQKLLRELNDEEVRETVRRIQELIEQAARLAKSKDPRDAELALIIAQVAALIVDIFELMQKLKRTLNDEKVRKLIEAIKKLIAMAAKAAKSKDPRDAKWALELAKTALAIVEQFERV

SEQ ID NO: 2313 - protein, 259 aa, synthetic construct
  REGION 1..259: note = Synthetic
SERVEEAIKLAKTVIKLAKYALKLLEATGMDEELIKKLRELLQKADELLKEAEAQGDEEQARIVWAILVALLHILSALFTLMELRKAGMDSSLIEKFKELLKKALELLIEAARKGDEETARVVLTILAALQVILEASKILMTLAKLGMDEELIKKFKELLEILLELLREAARKGDEKTARVVLLIVKALLVILKASYILMRLREAGMDEETLRELQKFLKEALERLIEAARQGDEETAKAVLHLVAFLLSLLEFLLSTM

SEQ ID NO: 2314 - protein, 291 aa, synthetic construct
  REGION 1..291: note = Synthetic
SEELLDIAYKVSQASAKVLTILTKLKEFAKKYGYPESLDEAIEEILRVIAEAQRAVKEALERGDPRTAELALIAAKVALFIAQVLLILLRLQEFAKKYGYPESLQEAIEEIERVIREALRQVYEALKRGDPRTATLALIAAKVALFIAQVLLILLRLQEFAKRHGYPESLQEQIEEIERVIREALRLVYEALKRGDPRTAALALIAAKVALFIALVLLILLRLDEFMKKHGYPESLQEKIEKIAREIREALKKVKEALKRGDPSTAQKALEAALRAYSKALTSMFELKEEE

SEQ ID NO: 2315 - protein, 300 aa, synthetic construct
  REGION 1..300: note = Synthetic
TEHELLQLYRHALELSEQIKRLLEEIRKLLPPGESERQTRTFEQLLRAIEAILKRAVELAKRGNTEDAQTFMYLAVLLAQALVLLAEIIRLTLEIAKLLPPGESEEQTRTFEELFRAIFEILKHAVELTERGNTEDAQTFMELAVLLAQALVLLAEIIRLLEEIKKKLPPGESERQARIFAELLRAIQEILKKALELTKNGNTEEALTFMALAVHLAYAVVLLAEIIRLTEEIREKLPPGESERQTRRFKKLLREIQEILRKALELTKNGNTEEAFKLMLEAVFAALVLVAEAKEIKDRE

SEQ ID NO: 2316 - protein, 300 aa, synthetic construct
  REGION 1..300: note = Synthetic
ALEKLSQLLKKALDLLAAIEELVEEIREKLPPGESEKQTRQFEKLLAAIKQILERAFELARRGNTEDAATFMKLAVLLAQAVVLYAEIIRLLEEIRELLPPGESEEQQRIFEELLRAILEILRKALELTRRGNTEEALTLMKLAVALANAVVLLAEIIRLLEEIREKLPPGESERQTRFFEELLRAIQEILKKALALTQRGNTEEALTLMELAAALAQAVVLLLQIIRLVEAIRERLPPGESERQTKRFEAALREIQEILRKAVELTKNGNTKEAMAAMATAAYKAWYLVHEAKAILKKT

SEQ ID NO: 2317 - protein, 290 aa, synthetic construct
  REGION 1..290: note = Synthetic
SLELHKEAFRAFKSLLAALEEVERFEAKATSEEQKERIRQLYETLLEAFDLIYKTFQEALANGDPAEAQLAVEFAEAVATLVRALIKVEKYEAKATSEEQKERIRQLSETLLRAIRQIVQTFREAKANGDPAQAKIAVEFAKALASLVDALIKVMKYEAKATSEEQKEKIRKLSETLLRAIHQIQKTFEEAKKNGDPAEAKIAIAFAYAVAVLVEALIEIMKYKAKATSERQKETIAQLLEALDRAFEEIQETFERAKKNGDPAEAKSAVEKALNVAFQVLYTLFKEKKT

SEQ ID NO: 2318 - protein, 223 aa, synthetic construct
  REGION 1..223: note = Synthetic
TAEAAARAQDYASKAYKLAQELGDPKLKKLVELVQKRIEEAVKAGDERKIEKILRMARALAYAAEAAKLAQEAGDPKAKEIVELVLERIIEALEAGDDKKIKLILKMAVAVAQALKALKLAQEAGDPKLKKLVELVLERIIEALKAGDERKIEQILAMAAALALAAEAVKLAQEAGDPDVREKVERVLEAIIRALEAGDESQIEKIVKEALKVALEAKHAKAK

SEQ ID NO: 2319 - protein, 223 aa, synthetic construct
  REGION 1..223: note = Synthetic
TAEAAARAQKYALAAYKLAKAAGDPKLEKLVDLVQKRIEEAVKAGDESKIEKILRLARALWYAAKALLLAQEAGDPKLKELVELVLERIIEALEAGDDEKIKNILLMAVALYLAAKALKLAQEAGDPKALKAVELVLERIIEALKTGDQRKIEQILTMAAALALAIEALKLAQEAGDPKAREKVERVLEQIIRALEAGDESQIEKIVKEALKIALEAAHAKAK

SEQ ID NO: 2320 - protein, 220 aa, synthetic construct
  REGION 1..220: note = Synthetic
SELFKHVRKTVEKAIEKAERLGDPDAVETAKQLKRRVEEAAKRGDWKEIFRLAASITVLLTVLQALEKAARLGDPDAYETAKRLLEQVISAIKRGDESKIAALMTFIKVLLTVLQALEKAARLGDPDAYETAKQLLRQVIEAIKRGDESKIKELMEFIAVLLTVLQALEKAERLGDPDAFKAAKTLLELVIEAIRRGDKDAIERLMHMIASLLKQLEAKE

SEQ ID NO: 2321 - protein, 223 aa, synthetic construct
  REGION 1..223: note = Synthetic
TEEELMEAKFAAYYAELVAKSAGDPKLKKAVELVKERIEEAERAGDERKIEKILRMARALAYAASAVLLAQQAGDPKLKEIVELVLERIIEALEAGDDRKIELILTMARAVWYAAKALKLAQAAGDPKLKKLVELVLERIIEALKAGDERKIEQILVMAWAVWAAAKAVLLAQEAGDPDLREKVERVLEAIIRALEAGDESQIYKIAEEAYKVAATAFAAKTT

SEQ ID NO: 2322 - protein, 223 aa, synthetic construct
  REGION 1..223: note = Synthetic
SSYLLTLAKEAAAKAEELAKRAGDPKLKKAVELVKKRIEEAERAGDEHAIWLIHVMAAALAYAAAAVKLAQELGDPKLKEAVELVLERIIEALEAGDEKKIYQIWYMAVALWYAAKALKLAQAAGDPKAVKAVELVLERIIEALKAGDERKIHQILVMARALWYAAKALLLAQKAGDPSLRTKVEKVLELIIRALELGDEMAILAILNAAVEVWEEAQEKLEK

SEQ ID NO: 2323 - protein, 223 aa, synthetic construct
  REGION 1..223: note = Synthetic
SELTLAQAKSAATKAEEIAKKAGDPKLKKAVELVKKRLEEAERAGDERKVEKILRMARALWYAAAALLAAQAAGDPKLKEIVELVLERIIEALEAGDERKIEQILTMAQAVWYAAWAVLAAQRAGDPKARKAVELVLERIIEALKAGDEKKIELIAAMARALWYAAAALLAATRAGDPRAREAVERVLEDIIRALERGDSSDIAKIAAKATEVWYEALRALMK

SEQ ID NO: 2324 - protein, 223 aa, synthetic construct
  REGION 1..223: note = Synthetic
STSALARAKWAAAKAEELAKRAGDPKLKKVVELVKKRIEEAAKAGDERKIEKILRMARAVYYAALAVLAAQAAGDPKAKEIVELVLERIIEALEAGDERKIQQILTMARAVWYAADALVAAQRAGDPKLRKVVKLVLERIIEALAAGDESKIDYILAMAAAVWYAAAALLAAQRAGDPRAREAVERVLEQIIRALEAGDSSQINKIYLEAVEVYEEALRALKK

SEQ ID NO: 2325 - protein, 223 aa, synthetic construct
  REGION 1..223: note = Synthetic
SSDALSRAKWAATKAEELARRAGDPKLLKVVELVKKRIEEAERAGDERKIRKILRMARAIYYAAAALLAAQKLGDPKLKEIVELVLERILEALEAGDERKIQQILTAALAVWYAAAALLAAQRAGDPKALKAVELVLERIIEALKAGDEKKIEYILAMAAALWLAAAALLAAQRAGDPRAREKVERVLEQIIRALEAGDASQINKIAATATEVYEEAWAALVK

SEQ ID NO: 2326 - protein, 223 aa, synthetic construct
  REGION 1..223: note = Synthetic
SSLALTRAKWAATKAEELADRAGDPKLKKAVELVKKRIEEAARAGDDRKIEKIERMARALWYAAAAVLLAQAAGDPKLKEAVELVLERIIEALEAGDERKIQQILTMARALWYAAAALRAAQHLGDPKLKKAVKLVLERIIEALKAGDESKIELIAAMAAALWYAAFALLLAHNAGDPRAREKVERVLEDIIRALEAGDSAQIAEILKKALEVWEEAVRANLK

SEQ ID NO: 2327 - protein, 223 aa, synthetic construct
  REGION 1..223: note = Synthetic
SQIAASKAEFAAAKAEEAADRAGDPKLKKAVELVKKRLEEALKAGDERKIEKILRMARALAYAAKAVLLAQEAGDPKLKEAVELVLERIIEALEAGDERKIKQILKMARALWYAAAALKIAQRAGDPKLKKVVKLILERIIEALKAGDEEKIDLILAMAEAVWYAAAALIAAQRAGDPSAREKVERVLEQIIRALEAGDKSQISKIALEATEIYEEAAAALVK

SEQ ID NO: 2328 - protein, 223 aa, synthetic construct
  REGION 1..223: note = Synthetic
SQVAASKASTAAAEAEELARRAGDPKLKKVVELVKKRIEEAERAGDEDKIEKILRMARAVAYAAEAVLLAQELGDPKLKEAVELVLERIIEALEAGDERKIQKILTMARALWYAADALKAAQRAGDPKLVKAVKLVLERIIEALKAGDEKKIDLILLMAEALWLAAAALIAAQRAGDPKAREAVERVLEQIIRALEAGDESQINKILATATKVYKEAAKALKK

SEQ ID NO: 2329 - protein, 223 aa, synthetic construct
  REGION 1..223: note = Synthetic
STIAASKASTAAAEAEELAKRAGDPKLKKVVDLVKKRIEEAERAGDERKIEKILRMARAVAYAADAVLLAQALGDPKLKEAVELLLERIIEALEAGDERKIQQILKMARALWYAAAALEIAQRAGDPKLKKVVELVLERIIEALKAGDEEKIDYIAAMAAAVWYAAAALIAAQRAGDPSAREKVERVLEQIIRALEAGDKSQINKIAATATKVYKEAAKALVK

SEQ ID NO: 2330 - protein, 223 aa, synthetic construct
  REGION 1..223: note = Synthetic
SSIAASLAKWAADKAEELAKRAGDPKLEKAVELVKKRIEEALKAGDEKKIEKILRMARALWYAAAAVLLAQALGDPKLKEVVELLLERIIEALEKGDDRAIELILKMARAIWYAADALAAAQTAGDPKLKKAVELVLERIIEALKAGDEEKADYIAAMAAALWLAAAAVLAAQRAGDPRAREAVERVLEQIIRALEAGDKSQINEIRKTAQEVYEEAWRALLK

SEQ ID NO: 2331 - protein, 244 aa, synthetic construct
  REGION 1..244: note = Synthetic
SEDAALLALLIAKAIALAATQLYKKTGDPQAAEISEKAKELMEQVRRNGKDERELKLIILLLQAMQLALAIIKIAQELYERTGDPQALEISRRAKELLRRLLKAGKDERELKLIILLLTAMLLALQIIKIAEELYERTGDPQAKAISETAKELFRRVLEAGKDERELKLIILLLKAMLLAVQIIKIAEALKRETGDPLADTIVKVAKSALRALLEAGKDEERLKKIIKFLKHVLEQVETIAKTR

SEQ ID NO: 2332 - protein, 223 aa, synthetic construct
  REGION 1..223: note = Synthetic
TEIALALAKYAATAAEEIAKRAGDPKLKKAVELVKKRIEEAERAGDSRKIEKILRMARALWYAAAAIELAQEAGDPKAKEIVELVLERIIEALEAGDERKIQLILTMARAVWYAAAALVAAQRLGDPKAVKIVKLVLERIIEALKAGDEKKIEAILAMAAAVWYAAAAILAAQRAGDPKAREKVERVLEQILRALEAGDDSQIAEILKTAHTVYEEAHKAALK

SEQ ID NO: 2333 - protein, 223 aa, synthetic construct
  REGION 1..223: note = Synthetic
HEITLTLAKYAATAAEELAKRAGDPKLKKAVELVKKRIEEAERAGDSRKIEKILRMARALWYAAAAVKLAQALGDPKLKEVVELVLERIIEALEKGDEREIQRILLMARAVWYAAAALAAAQHAGDPKLKKAVKLLLERIIEALKAGDESKEELILAMARALWYAAAAVLAAQRAGDPDAREKVERVLEQIIRALEAGDKSQIAEILKTAHTIYEEAHKAALK

SEQ ID NO: 2334 - protein, 223 aa, synthetic construct
  REGION 1..223: note = Synthetic
SELVAARAKHAATKAEELARKAGDPKLKKLVELVKARIEEAERAGDESKIEKILRMARALAYAAAALLAAQAAGDPKAKEIVELVLERIVEALEAGDDRKIEQILAMARAVWYAADALLAAQRAGDPKLRKVVKLVLERIIEALKAGDEKKIELILAMAAAVWYAAAALLAAQRAGDPRAREAVERVLEEIIRALEAGDESQIANIASTAHDVYDKAAAALKK

SEQ ID NO: 2335 - protein, 223 aa, synthetic construct
  REGION 1..223: note = Synthetic
SSTQAAAAKHAAKKAEELARRAGDPKLLKLVELVKKRIEEAERAGDDRKIEKILRMARALAYAAAALLAAQKAGDPKLKEIVELVLERIFEALKAGDDRKVEELLLMARAVWYAAAALLAAQRLGDPKLKKVVKLVLERILEALKAGDSKKIHLIAAMAAAVWYAAAALLAAQAAGDPDAREKVERVLEDIIRALEAGDESQIAKIALKAKAVYEEAWKALLK

SEQ ID NO: 2336 - protein, 223 aa, synthetic construct
  REGION 1..223: note = Synthetic
SNTDATRAKLAAERAEELAKRAGDPKLEKAVELVKKRIEEAEKAGDKKKIEKILRMARALWYAAAAVKLAQALGDPKLKEAVELLLERIIEALEKGDDRKIKQILAMARALWYAAAALAAAQHAGDPKLKKAVELVLERIIEALKAGDEEKINQIAAMAAALWYAAAAILAAQRAGDPKAREKVERVLEAIIRALEAGDKSQIAEIYKTAVKVYEEAAKALLK

SEQ ID NO: 2337 - protein, 223 aa, synthetic construct
  REGION 1..223: note = Synthetic
SSLDATWAKWAASKAEEIARRAGDPKLKKAVELVKKRIEEAERAGDERKIKKILRMARALWYAAAAVLLAQAAGDPKLKEVVELLLERIIEALEAGDERKIEEILTFARAIWYAAAALRAAQHAGDPKAVKAVKLVLERIIEALKAGDEDKLDLIAIMAAALWYALAALLLATNAGDPKAREKVERVLEQIIRALEAGDKSQIAEIYKTAVEVYEEAWRANLK

SEQ ID NO: 2338 - protein, 223 aa, synthetic construct
  REGION 1..223: note = Synthetic
SSIAATKAKWAAAKAEELAKRAGDPKLKKAVELVKKRLEEADRAGDDRKIEKILRMARALWYAAAAVKLAQEAGDPKLKEVVELVLERIIEALEAGDERKIQLILTMARAVWYAAAALIAAQRAGDPKLKKVVKLVLERIIEALKAGDESKIDLIAAMAEAVWYAAAALTLAQSAGDPKAREAVERVLEQIIRALEAGDKDQIAKIALEAYEVFLEAWRANTK

SEQ ID NO: 2339 - protein, 223 aa, synthetic construct
  REGION 1..223: note = Synthetic
SSITASKAKTAAERAEELAKKAGDPKLKKAVELVKKRIEEAERAGDDKKIEKILRMARALWYAAAAVLLAQKLGDPKLKEVVELVLERIIEALEAGDESKIAKILKMARAVWYAAAALAAAQRLGDPKLKKAVELVLERIIEALKAGDDDKIDYIAAMAAALWYAAAALLAAHNAGDPSAREKVERVLEAIIRALEAGDESQINKVAKTAEQVYEEAHAANLK

SEQ ID NO: 2340 - protein, 223 aa, synthetic construct
  REGION 1..223: note = Synthetic
SSITASLAKYAAAAAEELAKRAGDPKLKKAVELVKKRIEEAEKAGDSRKIEKILRMARALWYAAAAVKLAQEAGDPKLKEVVELVLERIIEALEAGDERKIKLILKMARAVWYAAWALKAAQHAGDPKLKKAVELVLERIIEALKAGDEKKFDYILAMAAALYYAAAAVLAAQRAGDPKAREKVERVLEQIIRALEAGDESQINEILKTAHTVYEEAVKAALK

SEQ ID NO: 2341 - protein, 223 aa, synthetic construct
  REGION 1..223: note = Synthetic
SETAEALATFIREALKKLKKLAKELGDPRLLKLLAEAEKKVKEAYRAGDERTLKLVALFITILIHAIELHKLAEEEGDPRLLEKVQQALEEIKRAFEAGDSKTLKLVYWFIQILILLIELAKLAKELGDPRLLKAVKEAWEEVFRAYEAGDEDTLKLVHLFIAILIALIKLRKLAEELGDPHLLRLIELAFTLVFTAFKEGDDTFLHWVLEWIERAFEKIERW

SEQ ID NO: 2342 - protein, 204 aa, synthetic construct
  REGION 1..204: note = Synthetic
SEAALNKLEWLMLVIAQLYKKYGDERAREAVEHAERVYKKGDERDIKHALLLLQLIELMIEIQELYEKYGDERAREAVEEAERLFEAGDERKIKQALLKLKLIKLMIEIQELYEKYGDERAREAVEKAERVFEAGDENQIRKALLLLELIRLMIEIQELFEKHGDELARWAVENAATVFKKGDEALIRSALAILEEIKKKQEEK

SEQ ID NO: 2343 - protein, 224 aa, synthetic construct
  REGION 1..224: note = Synthetic
SEEIERILEAVLRYILYVLQKAKELGDPQLLTFALELFNQLERVKKNNDSAQAEIILILAKVLYYIASVLEAAQKLGDPDLLEMARQLLEKAKEILDNNDLKAARIILTLAAVLAAIANVLKAAQELGDPELLRMAKLLLKKAEEVLKNNDSKQAEIILALAMVLAAIANVLLAAREKGDPRLEKRAKELLEKAEEVLRNNDKERAKRILEKAFELLYKAFAAQ

SEQ ID NO: 2344 - protein, 224 aa, synthetic construct
  REGION 1..224: note = Synthetic
SEEIKTALEMVKFALKSVKTMAKKLGDPALLKMAEELERQAERVERNNDSKQAEIILILAKVLQAIALVLRLAQELGDPDLREMARQLLEKAEEVLRNNDLDAARIILTLAAVLKYIAYVLKLAQELGDPELLRMAKLLLEKAEEVLKNNDSKQAEIILILAKVLYYIAQVLKLAQELGDPELIAKAQELLEKAEEVLRNNDLERAKRILELAKMLYDYAVSQK

SEQ ID NO: 2345 - protein, 165 aa, synthetic construct
  REGION 1..165: note = Synthetic
SERQWELLEAILTVIELAKKAGDEAEESAREIWKKFQEAQKRGDEQTLREMVEEAKLLITILKVLELARKAGDEAAESAQRILEKFVEAQERGDEQTLREMVKEAKALIAILEVLERARKAGDEAQEKAEEILRRFVEAQERGDEDTLKEMVERAVKLISSLVAR

SEQ ID NO: 2346 - protein, 165 aa, synthetic construct
  REGION 1..165: note = Synthetic
TEREWELNAAILKVAELAQKAGDEAARSAKDIVHKFAAALERGDEQTLREMVEEAKLLLTILAVLELARKAGDEAAESAQRILQKFVEAQERGDEQTLREMVKEAKLLLVILYVLAAARKAGDEAQEEAEEILKRFVEAQERGDEDTLREMVKQALKLITKLQKK

SEQ ID NO: 2347 - protein, 221 aa, synthetic construct
  REGION 1..221: note = Synthetic
SSVEASKFETLLLEALALAYHLGNEEYLASAERIAEEFKKAEKKGDSETLARVFRKLEFIYTVLLALKLAKELGNEEYWKAAQKIFEKFERAAKAGDDETLKRVMAELWFIYAVLVALKLAKELGNEEYWETALRIFEKFKRAADEGDEETLKRVMKELHFILLVLKALKLALELGNEEAWQAALRIFEEFLRALEEGDDSTLEEALKKLKEIYLKLAATK

SEQ ID NO: 2348 - protein, 231 aa, synthetic construct
  REGION 1..231: note = Synthetic
DERYKKALTKIRLILLYVKFILKAAGNDPKIEEAIRRVKELIEAAERATSEEDMRHILALAEILAILVYVIAVLRLAGNDPKIEEAIRRVKELIEAAERATSEEQMRHILALAKILSILVTLILHLSAAGNDPKIEEAIRRVKELIEAAERATSEEQMRHILALAEILLILVQVIAALRKAGNDPKIEELLRYVKKLIEAAERATSEEQMTKILFAAKIASEWVYLLAVAK

SEQ ID NO: 2349 - protein, 224 aa, synthetic construct
  REGION 1..224: note = Synthetic
SEESEEAAKEVLRLALAVATLAKELGDPRNVERALEQLKEILKMQEAGDKKAAELILLALEVLFLALQVVKLARELGDPSNEKRAKEQVERIEEMIKAGDKKAAELIKLALEVLFLALQVVKLARELGDPQNERAAKEYVERIEEMIKAGDKSQAELIKLALEVLFLALEVAKLAEELGDPRNKEKAREQLEKIKEAIKAGDKDAARQIVLRLAFLVALLKIKK

SEQ ID NO: 2350 - protein, 224 aa, synthetic construct
  REGION 1..224: note = Synthetic
SETVEFAAKMVEDAAKEALEQAAAMGDKENRELAKRLMEQAKKASALGDWKKVNIIVMAVLVLKYAIKALALARAMGDKENLELAQRLMEQAFEAARLGDEKKVAIILLAVQVLWTAILALAVAREMGDKKNTELAQRLMEDAFKASALGDYEKVAIILTALQVLWYAILALKIARAMGDKENTKKAQEVMEIAFEAAKLGDETTVKLILEWVKELWRKIQNKL

SEQ ID NO: 2351 - protein, 223 aa, synthetic construct
  REGION 1..223: note = Synthetic
SEEKLKKLVEEIQAEAFETYAQGDEDAALKNIAAAALAATAVDLLEEIKKWAERLGDPRLRKLVELVLQIIEEALETFAQGDWDQATRNMEAALLAAKAVLLLFRIWEAAEAIGDPRLKKLVEAVLRIIEEALKTFQQGDWDQATRNMRAALLAAKAVELLFKLWELAKRVGDPRLEEQVEEVFRAIKEALETFEQGDWKRATVAMAFAANLAHNVVKKAKER

SEQ ID NO: 2352 - protein, 223 aa, synthetic construct
  REGION 1..223: note = Synthetic
SEEKLQKLVKEIHAEAVKTLKQGDKDAAAKNMFAAELADKAVALLEKIKEKAEKIGDPRLRKLVEIVYRIIEEALETFAQGDWDQATWNMLAALLAAEAVLLLFRILDAARRIGDPRLKALVELVLKIIEEALKTFEQGDAKQAFLNMSAAALAAYAVELLFKLWELAKRVGDPRLEEAVEEVLRRIKEALETFLQGDWVQAHENMVKAAKRAEEAVKKAAKR

SEQ ID NO: 2353 - protein, 215 aa, synthetic construct
  REGION 1..215: note = Synthetic
SEEEFHEFLQIALKALKLAKEMGDPEIEERVKRLLEQFYKAGDDEEKIRRLLKRIKFLMIAAEALLLAQRMGDPEIYERVKRLLQEFEEAGDDEERFERLLKRIKFLVTAARALLLAQQMGDPEIYERVKRLLRAFEEAGDDEERFERLLAKIAFLAHAAEALLLAQEMGDPDIYTRVKELLKAFEEAGDDEKRFKELLMKIAKTWFEAVLRRET

SEQ ID NO: 2354 - protein, 279 aa, synthetic construct
  REGION 1..279: note = Synthetic
TEEEIFKLLLELLHLLTEIAKEFKELKKKDEEAMRELQELFELAVEILLEAFKTFEQGDLEKAKKYIAIAIAILKLVLLLIRIFKKVEEEKSKDEEQMKQLEELFKLASEIIKRAIETFLKGDLEKAERLIRIAILILKAVLLLIEIFKKVEELKRKDEEQMAQLEELFQLLSELIKRAIETFLKGDLEKAEKLIRIAIQILKAVLHLIEIFLAIKEQASKDEERMAELKELFERASEEIKRAIETFRKGDLERAKKKIEEAWKILAKVQFAIFKREYA

SEQ ID NO: 2355 - protein, 252 aa, synthetic construct
  REGION 1..252: note = Synthetic
SLELKIKIAYVKTALKLIQTLIARLGDPRLQKLLEDLEKTIAEAEETYKKGDEDQARRLVEMAVLIAQVIALLAAIFKQVRELGDPRLQELAEDLLELIKQAIETFKQGDIEQAERQIRFALLIAKVILLLAEFIKTVRELGDPRLQALAEDLLKTIKAAIETWKQGDEEQAWRLVEMALLIAQVLVLLAEIFKKVRELGDPHLKKAAETLLELIARAIETFKQGDLEKAQKLIKAAVELAKLIKKTAETAE

SEQ ID NO: 2356 - protein, 252 aa, synthetic construct
  REGION 1..252: note = Synthetic
SLELEIKIAYVKTALHNIQDAIAKLGDPRLQKLAEDLRKTIAEAEETFKKGDEDQAKRLVEMAVLIAQVILLLAEIIKQVRELGDPRLQELAEDLLETIKQAIETFKQGDQEQAERQIRMALDILKVILLLAELIKQLRELGDPRLQALAEDLLKTIKAAIDTFKKGDEEQAKRLVEMALLIAQVLVLLAEIFKQVAALGDPHLKKAAETLLKIILKAIETFKQGDFEKALKLIKAAVELAELIAKSAKKKQ

SEQ ID NO: 2357 - protein, 252 aa, synthetic construct
  REGION 1..252: note = Synthetic
SLELEIKIAYVKTALKNIQKKISELGDPRLQALAADLEKTIREAEETFKQGDEAQAKRLVTMAVLIAQVILLLLAIIEALRKLGDPRLEALLEDLLETIAQAIETFKQGDEEKAERQIRMALLILKVILLLLEIIKILRELGDPRLQALAEDLLQTIAEAIETLKQGDTEQAARLVETALLIAKVILLLAEIFKKVRELGDPHLKKLAETLLKIIAKAIETFKQGDEEKAAKLVKAAIHLAKLIKKSAESTE

SEQ ID NO: 2358 - protein, 252 aa, synthetic construct
  REGION 1..252: note = Synthetic
SLELKIAIANVKLLLRLIQKAIAELGDPRLQALAEDLEKTVREAEETFKKGDEDQARRLIAMANLIAKVIALLLAIIKKLRELGDPRLQALAEDLFETIKAAIETFKQGDYEQAERQLRMALDIIYVILLLAEILKQLRKLGDPRLQALAEDLFQTIKEAIETLKKGDEEQAKRLFEMALLIAQVILLLAEIEQQIRELGDPTLKKAFETLLEIIFRAIETFKQGDFEKALKLLKMALELAKTILAYAASQK

SEQ ID NO: 2359 - protein, 252 aa, synthetic construct
  REGION 1..252: note = Synthetic
SEEMTELFLKVLHLLYKIELAVAKLGDPRLEKLAEDLWKTIEKAFETFNRGDEEQAKRLVEMALLIAQVILLLAEIIKQVRELGDPRLQALAEDLLETIKQAIETFKQGDEEAAERQVRMALAIAHVILLLAEIFKQVRELGDPRLKALAEDLLAIIKKAIETLKQGDEEQAARLIYLAMLIANVIRALAEIFKLVRELGDPRLKAQAEELFQTIKEAIEKFKQGDLEDAAKKVWAAIKKAARIAATAIKQK

SEQ ID NO: 2360 - protein, 252 aa, synthetic construct
  REGION 1..252: note = Synthetic
SEEFKTLVMRVKVALEQIKRNIKELGDPRLEELAKDLEKTIAEAEETYKKGDEEQAKRLVEMALLIAKVIWLLASIQQAIRELGDPRLQALAEDLLETIKQAIETFKQGDQEQAERQVRMALTIFKVILLLAKIIKAVRKLGDPRLQELAEDLLQFIKEAIETFKQGDEDKAKRLIHYALLIAQVILLLAKIFAQVRELGDPRLKAQAEELLQTIKEAIEKWKQGDEDTAYALVLRALYTAKHILEEAETQK

SEQ ID NO: 2361 - protein, 251 aa, synthetic construct
  REGION 1..251: note = Synthetic
SSEQVTKMLNIILAIIKLALKLKKKGQKESAEQVLQTAEEILEKIVQASKNGDEKRLELLALVAEMVYIIAQILELAAQLKEQGQKQSAEQVFQTAQEILEQIKRASENGDEERLRLLLLVARMVYIIAQILRLALELKRQGQKESAEQVFRTAQEILEKIKRASANGDERKLRLLALVANMVLIIAEILLLAIKLKRKGQKEKAEEVFARAQKILEKLKEAVENGDEDKLQELQATAVKVALKALKELAK

SEQ ID NO: 2362 - protein, 251 aa, synthetic construct
  REGION 1..251: note = Synthetic
SLDAVVTMSHIIAAILKLAKKLKEKGQEESAEQVERTAKEIAEEIKKALKNGDEQRLRLLLLVAEMVYIIAQILLLALELKEQGQKESAEQVFQTAREILEQIKKASENGDEEKLRLLLMVAKMVYIIAQILRLALELKRQGQEDRAEQVFRFAQEILEQIKRASENGDKKRLALLLLVAHMVYIIAQILRLAVELLKRGQASKAEEIFKRAATILEQIKKALENGDTEKLLKLNEAALKLLLKAEEELEK

SEQ ID NO: 2363 - protein, 255 aa, synthetic construct
  REGION 1..255: note = Synthetic
SEEEKELAKFVLELLHRLLWILKLAKELGDPKLFETALRLAEQVNEWYARYKRTGDSKALEALELLALAIALVYLLAQILKLAQELGDPQLYATAERLLEQVERMLEKYLKTGDSKAKEALELLALAIKLLYLLAQILKLAQELGDPDLYRTAKRLWEQVLEMFEKYLRTGDSAALEWLELLAIAIALFRHLAEILKMAQELGDPSLFRTAQELFEKVEEMLEYYRRTGDSKAEEALWELLFEIANLALTAAAKQ

SEQ ID NO: 2364 - protein, 224 aa, synthetic construct
  REGION 1..224: note = Synthetic
SWEASWRLQAFFELALKALALAEEAGDPKLFKQAEETLKRFFEVEDRGDEEELKKMDQLLKAIYLALVALKLAQEAGDPDLFKQAQKTLERFTEVVKRGDEEELSALMALLQAILLALKALKLAQEAGDPRFFKQAQKTLEEFKRIVERGDDKQLALMHALLWAILAALQALVLAQRAGDPDLFEKARKTLEEFEKVVKKGDEEQLREMLKKLARIVLTLAQQV

SEQ ID NO: 2365 - protein, 255 aa, synthetic construct
  REGION 1..255: note = Synthetic
SEEEKELAKLALALLELLLKIQKLAFELGDPDLLKTAKRLSEQVNELYARYKRTGDEKAEEALKLLKLAIELVYLLAQILKLAQELGDPQLYATAKRLLEQVERYYEKYRKTGDSKAEESLELLKLAIELLYKLAQILKLAQELGDPDLYRTAKRLFEQVEEMFEKYLRTGDSKAKESLELLAIAITLFALLAEILKLAQELGDPSLFRWAQEKFEEVEEMLEKYRRTGDSKAEERLWELLWEIYKVLSTAYAKK

SEQ ID NO: 2366 - protein, 255 aa, synthetic construct
  REGION 1..255: note = Synthetic
SEEDARLEVAAKLLKTTLKKILRLAEELGDPDLFETALRLFEQVEEALRRYKRTGDKKALESLHLLTLAIELFYLLAQILKLAQELGDPQLFRTAKRLLEEVERMLEKYRRTGDEKAVELLELLLLAIALFYLLAQILKLAQELGDPKLYKTAERLLQQVEEMLEKYKRTGDSKALESLELLALAIRLLYLLAQILKLAQELGDPDLFDTAQKLLELVEKAFEEYRKTGDKQAKAFLENLAKFIAELYRQALKKK

SEQ ID NO: 2367 - protein, 223 aa, synthetic construct
  REGION 1..223: note = Synthetic
SELTAVHFKLAVKAIKEYAKEIGDPRLLEQAERLEEKAKEVERAGDEEKLKFLALTAQFMALVAAILKYAKELGDPKLKERAERLFEKLEEVEKAGDEDKLKFLILTAELMALVAEILKYARELGDPKLLAQAKRLLKKAEEIERAGDEEALKFLILTARLMALVAAILKYARELGDPDLYTFAKLLFEAARQVEEAGDEDKLRELIESAAQAYKTAVRKALK

SEQ ID NO: 2368 - protein, 227 aa, synthetic construct
  REGION 1..227: note = Synthetic
TEEEAKLFAKVSKLIAKILELALKLGDERILQTARELQKEAEEMAKMGDLDRLKRLYITAEVIVLIAQILQYAKELGDERIWKLAQELLEEARQAHEMGDEERLRQLLIFARVIVLIAALLKYAKELGDSWIWQYAQELLEEAKRMKEAGDSERLRLLLLTAEVFVAIAAILKYAKKAGDKDLWEWAQRLLQKAAEMYEKGDKEALYKLLIEAIVALSKAQLKAHEK

SEQ ID NO: 2369 - protein, 227 aa, synthetic construct
  REGION 1..227: note = Synthetic
SESQKIQTLIVKFAIAAIEEAAKKLGDERIKKTAKKLKQEAQEMAEMGDLRRLHALALTAFVIAAIAELLLYAKELGDSRIWQLAQELLEEARQMKEKGDEERLRQLLFFARVLVLIAQILKYAKELGDERIWKFAQALLEEAKRMWEAGDSERLRQLYITALVIVLIARILKYAKKLGDSKLWEWAQRLLELAARAKEMGDSKLLKQLLWLAKMLVAKAQEQEKKK

SEQ ID NO: 2370 - protein, 227 aa, synthetic construct
  REGION 1..227: note = Synthetic
SESQKLLTKLVKEAIKKIEEYAKKLGDERIKKTAEELKQEAQEMAEKGDLKRLAELYLTARVILEIAKILQYAKELGDERIWKTAQELLEEARQLKDMGDLERLRELLLTARVIVLIAQILKYAKELGDEDIWKYAQALLEEAKRMFEMGDSERLRQLYITAEVIVLIARILKYAKKLGDEDIWRAAQSLLEQAKKAYEMGDKLYLELLLEAAKKLVKEAAKKAKEK

SEQ ID NO: 2371 - protein, 227 aa, synthetic construct
  REGION 1..227: note = Synthetic
SEAFELLVKLVKEAIKKILELAKKLGDERIQKTAEELKREAEEMEEKGDEKRLVELSQFATVIALIAAILQYAKELGDSRIWQTAQELLEEARQMYEKGDLERLNQLEITARVIVLIAQILKYAKELGDEWIWKFAQELLEEAKRAKEMGDEERLRELLITAEVIVLIARILKYAKELGDESIWRAAQELLKKAAEAKEMGDWLFLRILLKAAKKLLAEAQKQAKEK

SEQ ID NO: 2372 - protein, 211 aa, synthetic construct
  REGION 1..211: note = Synthetic
SEEAFEMARRAFELITAIVRNATSPRYVELAWRLADDILKAALSGDEDKLRLIIMTAEAILLILQILNNATSPEYRQTAEELFEAVKRAYEEGDEDKLRQLIATAQAILLILQILKNATSPAYQEEAQALFEQVKRAYEEGDESRLRQLYATALAILLILQILKNATSPEYRETAERLFEKVKRALEEGDESKLYQLALTALYLLSQLEQT

SEQ ID NO: 2373 - protein, 211 aa, synthetic construct
  REGION 1..211: note = Synthetic
SKEATEMARRASKLIVAIVRNATSPRYKELAKRLQDKVLKAAKSGDESKLKQLIMTAEAILLILQILANATSPEYRQFAEELFEQVKRAFEEGDESKLKQLIATAQAILLILQILHNATSPKYQEEAQQLFEQVKRAFEEGDEKKLSILYATAAAILLILQILKNATSPEYRETAERLFEAVKRAQEEGDESKLYKLALHAEYLLSRLKQT

SEQ ID NO: 2374 - protein, 211 aa, synthetic construct
  REGION 1..211: note = Synthetic
SEEAREMFERALKLIEAIVKNATSPAYKEEAKRLNEAVLKAALSGDEDKLKQLIMTAEAILLILQILNNATSPEYRKFAEALFRQVKRAFEEGDEDKLKQLIATAQAILLILQILKNATSPEYQELAQQLFEQVKRAFEEGDEKKLRLLYATAAAILLILQILRNATSPKYRETARRLFEAVKRAQEEGDEEKLYKLYITALHILSALKLT

SEQ ID NO: 2375 - protein, 264 aa, synthetic construct
  REGION 1..264: note = Synthetic
TEEDERKVEALLRELFELIEEMEETAKKVGDPQAYKLFYLAVLISLKALEAVARGDESKLKRLMVLIKVIILLIKLFKLLLEMKETLKKAGDPQAEKLVRLAKEIIEKALEAVERGDEEKLRRLMQLIRVIILLIKLFKLLQEMKDTLAKAGDPLAEQLVRLAATIIEKAIEALERGDEEKLQRLMQLIRVIILLIKLFKLLQEMRRLLKKRGDPKAEELVRKAERIIRKAIEAVERGDEEKLKKLMIEILLIHQEIILFKLEQ

SEQ ID NO: 2376 - protein, 211 aa, synthetic construct
  REGION 1..211: note = Synthetic
SEEQTDMWKKFAALIQKILENATSPAYAELALRLLHKANRAYKEGDEDKLKQLIATAAAILLILQILANATSPEYRKFAEALFRQVKRAFEEGDERKLKQLVATAEAILLILQILKNATSPEYQEEAQALFEQVKRAFEEGDERKLKQLVMTAYAILLILQILANATSPKYRETAERLFEAVKRAQEEGDESKLKELILTATLILYRLTYQ

SEQ ID NO: 2377 - protein, 221 aa, synthetic construct
  REGION 1..221: note = Synthetic
SAELIWKIWHMLEKVLTAAKKLGDPKYRELAKRLWEQFAKAAKAGDERKLEELLKFLKILLMVATVLKLAQDLGDPKLRELAKRLLKAVIEAYEAGDKDKLEFLLRFLEILLAVAAVLAWAQKLGDPKLKELAKRLLEEVIRAYKEGDSEKLKKLADFLAILLAVAQVLAWARTLGDPRLKKKAKELLEKFIRAYEAGDERKLEKLFLKLLELLNEASAEW

SEQ ID NO: 2378 - protein, 166 aa, synthetic construct
  REGION 1..166: note = Synthetic
SEEEWFEVALMLARIMNDARHKDPTLARLAKQLVKKFEEVKEAGDEDKLKQIKRFAKLAIALLKILAIAENKDPTLYRLAKQLIEAMFEVFEKGDEEKLKKILKFAEVALALANILATAANKDPRLYATAKELIKKMFEVREKGDDDKLEEILKAAAEALITALKQ

SEQ ID NO: 2379 - protein, 166 aa, synthetic construct
  REGION 1..166: note = Synthetic
SSLEWFEVSQLLLKILQTAKHKDPTLYRLALQLFAQMEEVKKAGDTDKLDKIKKFATVALILLEILARAENKDPTLYRLAKQLIEAMFEVFEKGDDDKLKKIFLFALVLLALANILEKAENKDPRLYATAKELIKKMWEVREKGDESKLDEILEQALRAQKEATRL

SEQ ID NO: 2380 - protein, 221 aa, synthetic construct
  REGION 1..221: note = Synthetic
KEKEFKEAFKMIQEAFELAKQAGNPQLMTIVRKLLKEVEKAYKKGDSSALKKIKRFAEAVTMIAKAFKLAQEAGNPQLKEIAQKLLQAVLEAFDLGDSERLEFILQFAEAVTMIAAAFKLAQEAGNPKLEEIVEKLLQAVLEAYQLGDLSRLRKILAFAAAVTLIANAFKAAQEAGNPQLKREVKELLQAVLEAFQLGDTDRLKEIYFKAMAVSLKATLAR

SEQ ID NO: 2381 - protein, 221 aa, synthetic construct
  REGION 1..221: note = Synthetic
TELEFLYAEVAIKLAELYAKRAGNPQLEEIVEKLKEEVKRAKKEGDLDRLKFILRFAEAVTMIAQAFVLAQEAGNPQLKEIVQKLLQAVLEAWELGDEDRLKEILQFAKAVTMIAHAYKLAQEAGNPKLEEIVQKLLQAVLEAYDLGDLDRLRKILKFAEAVTMIARAFKLAQEAGNPWLEKILETLLQMVLEAYQLGDESKLKTIVELAKLVTWYAKTAK

SEQ ID NO: 2382 - protein, 221 aa, synthetic construct
  REGION 1..221: note = Synthetic
SLEEFLKAQKMIATAFELAKKAGNPQLQEIVEKLQEEVNRAFKEGDERRLKFILRFAEAVTMIAKAFKLAQEAGNPQLKKLLQELLQQVLEAWDKGDEDRLKKILQFAEAITMIAEAFKLAQEAGNPKLEEILKKLLQAVLEAYALGDSSRLRKILLFARAVTAIAQAFKLAQEVGNPELEKELEELLQQVLEAYDKGDESRLAKIVFAALHVYLKAKLEK

SEQ ID NO: 2383 - protein, 221 aa, synthetic construct
  REGION 1..221: note = Synthetic
SVYEFLTALEMISKAAELAKAAGNPELEEIVKKLWKEVYEAIRLGDEDKLAEILRFAAAVTMIAQAFKLAQEAGNPKLKEILQKLLQAVLEAFDLGDDSRLKEIIAFAAAVTAIAKAFKLAQEAGNPKLEEILEKLLQAVLEAYQLGDSSRLAFILVFAYAVTHIAEAFKLAQAAGNPELKREAEELLQKVLEAWEKGDSKKLWDILFKANEVTDKAKAEK

SEQ ID NO: 2384 - protein, 221 aa, synthetic construct
  REGION 1..221: note = Synthetic
SVYEFMVALTMIHKARELATEAGNPQLKEIAKKLWKEVVKAIKLGDEDKLKKILRFAAAFTMIAQAFKLAQEAGNPKLKEILQALLQQVLEAFDKGDDDRLKEILAFAAAVTAIAKAFKLAQELGNPKLEEILKKLLQAVLEAFKLGDSSRLAFILVFAYAVTSIARAVKLARAAGNPELKREVEELLQAVLEAWEKGDESKLWEILFKANEVYDKAAKEK

SEQ ID NO: 2385 - protein, 221 aa, synthetic construct
  REGION 1..221: note = Synthetic
SETEFTEAELAIKFAETAAKRAGNPQLEEIVKKLQEEVERAKKEGDSSALAKILRFAKAVTAIAHAFAHAQRAGNPKLKEILQKLLQQVLEAFDKGDDSRLEKILQFATAVEMIAAAFVLAQEVGNPQLEEILEKLLQAVLEAFQLGDLDRLKKILAFAAAVYMIAAAFKLAQEAGNPLLKTILKILLQKVLEAYQLGDLSKLAEIIRTAAEVTEQARQEK

SEQ ID NO: 2386 - protein, 264 aa, synthetic construct
  REGION 1..264: note = Synthetic
SDKAAAKVSALLLELFKLLQEMQKTLKKQGDPQAEKLVRLAQEIWEKAQEALERGDERKLQRLLQLIAVIILLIKLFKLLQEMKRTLEEKGDPQAEKLVRLAKEIFKKALEAVERGDEEKLQRLMTLIRVIILLIKLFKLLQEMKETAKKAGDPQAEQLVRLAAEIIEKAFEAVKRGDEEKLKHLMALIRVIILLIKLFKLLEEMKRTLKDTGDPTAEHLLKQAKYIIAVAIRAVETGDEELLEALAEVIKTIIKFIKAFKARQ

SEQ ID NO: 2387 - protein, 221 aa, synthetic construct
  REGION 1..221: note = Synthetic
KEEEFKRVTQAIELATFAAKEAGNPQLEEIVKKLQEEIERAKALGDLERLKEIYRFALAVAAIASAFLAAQKAGNPKLKEIVQKLLQAVLEAFQLGDTDRLAKILKFATAVAMIAYAYVLAQKAGNPKLEEIVKLLLDAVLEAFDLGDSERLEKILKFAEAVTMIAEAFLLAQAAGNPELKRLVKELLQAVLEAYKLGDLSRLDEILKWARDVTYLAKSVK

SEQ ID NO: 2388 - protein, 221 aa, synthetic construct
  REGION 1..221: note = Synthetic
TETEFKQAFLAIELAESAAKRAGNPQLQEIVEKLKEEIERAKQEGDTDALAKILRFAEAVLAIANAFLAVQKAGNPQLKEILQKLLQAVLEAFDKGDQDRLKEIKKFAEAVAMIAHAFILAKEAGNPQLEEILKKLLQAVLEAYQLGDSKRLAKILRFAEAVTMIAKAFKLAQEAGNPELKRLLQELLQAVLEAYDAGDDDRLKEILEFARAVTTQAESAK

SEQ ID NO: 2389 - protein, 221 aa, synthetic construct
  REGION 1..221: note = Synthetic
KEKEFKRAERAIEAAEFAARLAGNPQLEEIVEKLKEELERAKQEGDLDALKKILRFAEAVLLIASAFLLAQKVGNPQLKEILQKLLQQVLEAFDLGDTDRLAAILRFAEAVAMIAYAFKLAREAGNPKLLEILQKLLQQVLEAFQKGDQDRLAKILRFARAVTMIAKAFKLAQEVGNPELKRQVEELLQQVLEAFDLGDDSRLADILEKAKLVTYLAESAK

SEQ ID NO: 2390 - protein, 224 aa, synthetic construct
  REGION 1..224: note = Synthetic
DEDHKLLAKLVEEAVKFIKAAAERTGDEKLKKMAEEIERAAKEALKRGDKEQLKLIAIAVSVLAIVAEIIEIAEETGDEELKKMAQEILKAADEALKRGDEKRLKLIHLAVAVLLIVARIIKYAEETGDEKLKRMAARILRQAQEALERGDEEKLRLILLAVQVLYIVAQIIKIAEETGDEELKKYAQKLLDAAEKALEAGDEVLLRLILTLVEMLLAKAEKEK

SEQ ID NO: 2391 - protein, 224 aa, synthetic construct
  REGION 1..224: note = Synthetic
SEEAARLAAEVLTIVEKITKYAEKTGDEKLKKMAKDLTRKALEALAKGDEHALRLILLAVQVLYIVAQIIQYAQELGDEELLKMAQEILDAAKEALERGDEKQLRLILLAVQILYIVAQIIKLALELGDERLLKMAKKILEQAAEALKRGDEEALRLILTAVQILYAVALIIKYAEETGDEELKKRAQAILRRAWEALERGDKEALAKIYFEVLLLAAKAHAAK

SEQ ID NO: 2392 - protein, 227 aa, synthetic construct
  REGION 1..227: note = Synthetic
SEKLQHVAEVVLTAVANVKKAAERLGDPDLKELAEQIARIIKEALKAGDERKLFMAVVAVVVLNTVATVLETAYELGDPELIEIAKQILRIIWEALQAGDEDQLRMAQLALEVLQAVLEVLKIAEELGDPQLRDLARKIAKIIWEALQAGDERQLRMALLAIKVLLAVAKVLKYAEELGDPDLRRAAKKIAEEIVRALEAGDELTLWLALLKVMVLLSKAKAQAKKK

SEQ ID NO: 2393 - protein, 227 aa, synthetic construct
  REGION 1..227: note = Synthetic
DESMKTLATKVALAVLEVLMTASKLGDPKLYELAKQILRIIKEALAAGDERKLRMALLAVKILLTVAKVSKAAKELGDPTLEELAKQIARILEEALQAGDEDQLRRALLAVKVLLLVAKVLKTAEELGDPKLRELARRIAKIIIKALQAGDEKQLRMALLAVAVLLAVAKILTAAHNLGDPDLREKAKRIAEEIWRALAAGDEKKLREAAEKVKALLKQAVAAFEKK

SEQ ID NO: 2394 - protein, 224 aa, synthetic construct
  REGION 1..224: note = Synthetic
SEEIAKAAAKVKIAVMWAAHYAKQLGDPELKRLLQEIAETIEEILQRGDKTKARIAYMAAQVLLTVAKALLYAYELGDPRLLKLLKEIVRTIVEILRRGDEEKAQIAYMAAQVFLIVAQALKLAAELGDPELRARLKQILEWIQEILERGDKRKAEIAYAAAHVFLVVAQALKYAEALGDPSLREKLKRILRKIQEILERGDLLAALEAAAEANATLLEAREKL

SEQ ID NO: 2395 - protein, 224 aa, synthetic construct
  REGION 1..224: note = Synthetic
SESLKFMALQVKLAVTLAAAAARNIGDPELKALLEQIKEKIKEILKRGDFTKAQIAYMAAQVLLIVAKALLIAYALGDPRLLELLKEILRTIIEILRRGDFEKAAVAYMAAQVVLTVAQALLYAEELGDPELRKRLKQIVEYILEILKRGDLDKLALAVAAAAVILIVAQALKIAEALGDPSLREKLKRIVRKIQEILEKGDFDKAAKAVAEAYHVLSEAEAKL

SEQ ID NO: 2396 - protein, 252 aa, synthetic construct
  REGION 1..252: note = Synthetic
STEESAHAWLLLLEVLKLIMELKKAGLTEEIEKLEELLERLLRQFEEANKKGDEEAIKFVIRAARALLLLARVMKLILELEEAGLTEEIETLKELLERLLKQFARALAEGDAEAIKFVILAAEALYLLARVMKLILELEEAGLTEQIEFLKRLLKKLLKQFREALKEGDERKIKFVILAAKALYLLAAVMKAILELEAAGLTEQIERLKRKLQKLLEEFERALDEGDEEAIKRVFWAAIKLLFEAMKMLAEL

SEQ ID NO: 2397 - protein, 264 aa, synthetic construct
  REGION 1..264: note = Synthetic
REEDYKKVLKLLKELNKLIEEMMKTAKDTGDPQAYKLVALAVKISVKAWKALLEGDEDKLKKLMLLIRVIILLIKLFKLLLEMKRTLKEAGDPQAEKLVRLAKEIIEKAEEAVERGDEEKLARLEVLIRVIILLIKLFKLLQEMKETLAKTGDPLAETLVKLATEIIEKAIEAVERGDEEKLRRLMALIRLIILLIKLFKLLQEMQRTLKEKGDPKAEELVRKAEAIIRKAIEAVERGDESKLEKMLIEIALILTLIKYFKWEQ

SEQ ID NO: 2398 - protein, 216 aa, synthetic construct
  REGION 1..216: note = Synthetic
TETAKALYKLIERAAEELKQAAEEAGDPEILALVKEIQQKLREAGDDEKTLALAAQQVSILLAAFEALRRAEKAGDPDILRIVKEILQRLKEAGDDEKTLKLAQIQVEILLTAFEALDQAKKAGDPDILRIVKKILERLEKAGDDEKTLKLALTQVKILLLAFKAKQRAREAGDPRILRTVEEILKALEAAGDDETVLTLAASLVAYLLRKFEDKQ

SEQ ID NO: 2399 - protein, 216 aa, synthetic construct
  REGION 1..216: note = Synthetic
SDKLLKIWLTIVSLALTASLQARKAGDPEIQKLVKEIAQKLAEAGDDERTLKLLLTFVEILLLAFQALRRAEKAGDPQILRIVKEILQRLKEAGDDEKTLKLALIQVQILLLAFELLEQAKRAGDPQILRILKEILERLEKAGDDEKTLKLALLQVKILLAAFWAKQAAREAGDPRILKKVEEILEKLENAGDDESTLASAAREIFKLLLEFSSKK

SEQ ID NO: 2400 - protein, 216 aa, synthetic construct
  REGION 1..216: note = Synthetic
SEKLRFTYLLILLALKSAAKRAKAKGDPEILTLVKEIEQKLREAGDDEQTLKLAWIQVLILNIAAAAKARAEEAGDPDILRIVKEILQRLKEAGDDERTLKLALIQVAILLLAFELLEAAKRAGDPQILRILKEILERLERAGDDEKTLKLALIQVKILLIAFAAKQRAREAGDPLIEELVKIILKTLEQAGDDEETLREALEKVKTLLELFKSVK

SEQ ID NO: 2401 - protein, 215 aa, synthetic construct
  REGION 1..215: note = Synthetic
SEELELAAAEADHAARSAAKEAGTDPQLTRLVEAIQKQLKSALKAGDKDKIEFVVLAARAIAAAAKAKSTAGTDPQLLRLVKKILEALERAMKAGDKDKIELVVLAAEAIALAALAKSLAGTDPQLQRLVKEILRALEEAMDAGDKKKIYLVMLAAEAIAAAAMAKKMAGTDPRLQEEVQRILEKLEEALRAGDLKKILLVVLEAKQIAYTAAVQ

SEQ ID NO: 2402 - protein, 215 aa, synthetic construct
  REGION 1..215: note = Synthetic
KEELKLAAAHAAHAARKAQEKAGTDPQLVRLVEKIQKQLEEAKRAGDKSKIEFVALAAEAIALAAWAKEAAGTDPQLQRLVKKILKALEEALEAGDKDKIELVMLAARALALAALAKSLAGTDPQLQRLVKEILRKLEEAMKAGDKKKIYLVMLAAAAIAKAAMAKHAAGTDPRLQEEVQRILEKLEEAMREGDLIKILLVVHDAHNILMTAFLQ

SEQ ID NO: 2403 - protein, 221 aa, synthetic construct
  REGION 1..221: note = Synthetic
SMELVQEALKILEQILKIAKRLGDPELYRLAKKLLKALATALKRGSERDLEKVFIMIEAFLLAARILEIAKELGDPDLWRTAEKLLEQLEEAARRGSDKELAQVFIMVAAIYHAALILKIAKELGDPDLWALAEKLFKQLEEAQRRGSDKELKQVAFMVQAILIAAAILKIAAELGDPDLWRKAEELLRRLEEAQARGSDEELKRVATAVLLLYIEALLKK

SEQ ID NO: 2404 - protein, 221 aa, synthetic construct
  REGION 1..221: note = Synthetic
SLSLYTTALELAKQIKEIAKRLGDPELLRQAEKLEERLKEAMKAGSEKDLKQVFLMVEAILLAARILEIAKELGDPELWRQAEKLLEKLEEAAKRGSDEDLKKVFTMIAAFLMAAQILKIAKELGDPELWRQAEKLLEQLEEADARGSDEDLSQVALMVAAILHAAKILKIAEELGDPELKRKAKELLKRLEEAQRKGSEEELWRVAAEISNLLLKAKEKK

SEQ ID NO: 2405 - protein, 224 aa, synthetic construct
  REGION 1..224: note = Synthetic
SLTASIKYQEVAYLIHLILFIAKALGDPRLLARAEEALRRLKEARDAGDEEQLSRIYTFVKVVYLIARILEIAERLGDPRLLEQAERALEALEEAQRAGDDDKLDRIYVFVRIVYLIAEILRIAQELGDPKLLQLAAEALEELQEAYEAGDEDKLRRILHFVTVVYQIAEITRIAAEKGDPRLLEAAEELLRQLEEAKRAGDDRQLEEIQNKVSHIAAAAELKQ

SEQ ID NO: 2406 - protein, 224 aa, synthetic construct
  REGION 1..224: note = Synthetic
SEIETWAYKQIDELIKRIKEIAKRLGDPRLLARAEELERRLNEARRAGDKKQLERIHKFVAVVYLIARIIEIAEKLGDPRLKEQAERALDKLAEAQKAGDDEKLERIYLFVKVVYLIAEILRIAQELGDPKLLAFASRALEELAEADEAGDDEKLKRIYTFVKVVYLIAEILRIAEELGDPRLQELAKRALDALEKAHKAGDDDALTMIAKFVKQVYEAAVKKK

SEQ ID NO: 2407 - protein, 253 aa, synthetic construct
  REGION 1..253: note = Synthetic
SEEEFTKLLLAIVAALIKASKLAKELGDPQAQEIAKRILEALEEVERTMKEKGEKEAEQRLRFLRLSVEILYYALQALKLAQELGDPSAEAFARKILKKLEEVERTFDEKGAEEAEKRLRFLLTSVQILYLALQALKLAQELGDPRAEAIARKILEQLEKVERTADEKGWEEAEDRLRFLATSVKIVYAALEALKLAQELGDPDAEEKARRILEKLEKVERTYDEKGSEEATRRLLKLLLEVLRLVFKLSHKK

SEQ ID NO: 2408 - protein, 264 aa, synthetic construct
  REGION 1..264: note = Synthetic
TEEELKKVAEALAELWALLNEMQLALERQGDPTAEKLVRLAEEIIEKAKEALKRGDESKLRKLLVLIEVIILLIKLFKLLQEMKDTLKKAGDPDAEKLVRLAKEIIEKAEEAVERGDEEKLRRLMQLIRVIILLIKLFKLLQEMKRTAEEAGDPFAEELVRLAKEIIKKALEAVERGDEEKLQRLMQLIRVIILLIELFKLLQEMKRTYKKKGDPFAEKLVRQAERALKKALEAVERGDERKLLEAQATIKAIITAIKNYKKNT

SEQ ID NO: 2409 - protein, 163 aa, synthetic construct
  REGION 1..163: note = Synthetic
SEEIAYIIFQALIAALKAGDPDIVKEILKIFKAGDLEKAKIVLIIVQALLMAQEAGDPEILEAIKRILKAGDLDKAKIVWIIVQALKAAQEAGDPEIWEQIKRIFKAGDYKKAVIVLIIVWALAAAQRAGDPDLERKIKEILRAGDLEKALEVAAEVVLRQLK

SEQ ID NO: 2410 - protein, 194 aa, synthetic construct
  REGION 1..194: note = Synthetic
KEEEFEKLLKFIQTAVEIVKKIAKTLGNPELRRVAEELERLIEEMKKRFAKDKDAALKTVKFLAALARILAAVASVLIAAQELGNPELREVARALLREILEMLKEFRKDYEKAVKSLKFLLTLAKIIQYVAYVLKLAEELGNPELRQKARELLKKILEMLKKFRKDADQALREVKDLLDKAELIALEASAASLE

SEQ ID NO: 2411 - protein, 194 aa, synthetic construct
  REGION 1..194: note = Synthetic
SEEMFEEALKDIERYVKWVKKLAKELGNPELLTVAEQLEKLIEEMAKRFRKDKEKAFTSVIFLLHLAKIIYYVAQVLKAAQELGNPELREVARKLLKAIEEMLKAFRKDDDKALFAVNFLLYLAKIIYYVAEVLKLAQELGNPELRETARALLEKIEQMLREFRKDKEKAFLAVNKLLFEAELIYKLAQKQKEK

SEQ ID NO: 2412 - protein, 220 aa, synthetic construct
  REGION 1..220: note = Synthetic
HLEQNEMLYLFFTVAELAFEAGDPEAITLALALLKKALEAAKQGDEETLRKLAEQVKIIILFLKLLKLAREAGDPEAIELAQRLLEAAVRALKQGDEETLRKLAERVKIIILFLKLLKLARAAGDPEAIELAQRLLEAAVRAVKQGDDETLRKLAEQVYFILWFLKLLFLARKLGDPQAIREAEELLKEAVRAVKQGDDDTLKKLLKEVLEKLYELIAKK

SEQ ID NO: 2413 - protein, 220 aa, synthetic construct
  REGION 1..220: note = Synthetic
SESQWMFLYLFKVVLEAAKQIGDPEAIELAKQLLEQAERAAAQGDEDTLKKLAEQVAIILEFLTLLRAAREAGDPEAIELAQRLLEKAVRALKQGDEETLRKLAEQVRIILLFLELLKLAREAGDPEAIELAQRLLEKAVRAAKQGDEETLKRLAEQVKVILLFLRVLKLAREAGDPQAIREAEELLKYAVKAVKQGDETALRVLAAAVRWLISQLEEKK

SEQ ID NO: 2414 - protein, 220 aa, synthetic construct
  REGION 1..220: note = Synthetic
SEHEEEVIKIFKKLLKLAKEAGDPEAIELAKQLLEQAKRAAAQGDSSTLNKLAARVAVIIVFLELLKLAREAGDPEAIELAQRLLEKAVRASKQGDESTLINLARQVEIILLFLKLLKLARAAGDPEAIELAQRLLEKAVRASKQGDEETLSKLAEKVKIIILFLRLLKLARELGDPKAIKFAEELLKTAVRAAKQGDDLALKFHATIVKKAIEELEKKK

SEQ ID NO: 2415 - protein, 220 aa, synthetic construct
  REGION 1..220: note = Synthetic
TLEDVQLLAAFDALLEAAKKTGDEEVIRMAQELKEKAEEYVKRGDSEKLKKLARQVELLALFLKLILLAAKTGDEDLIELAKRLLKKAVQATARGDDEKLQKLARQVELLILFLELIFLAAKTGDEEVIELAKRLLKKAVEATKRGDDEKLQHLASLVHALIQFLKLIELAKKTGDEETIEDAKRLLEKAVQYTERGDEEALARLAKKVQDAQEKLKLKK

SEQ ID NO: 2416 - protein, 220 aa, synthetic construct
  REGION 1..220: note = Synthetic
TWEQVKLLAAFYALLQAAAKTGDEELIRLAKELLKKAEEATKRGDDEKLAKLARQVELLWLFLALIRLAKKTGDEEVIEMAKRLLKKAVQYTKRGDDEKLQKLARQVELLILFLELILTARKTGDEEVIELAKRLLKRAVQYTARGDDEKLQHLASLVEALIAFLKLIEKAKKTGDEEVLEQAKRLLEKAVEYTARGDEEALARLAYAIMLMLHTLEAKE

SEQ ID NO: 2417 - protein, 220 aa, synthetic construct
  REGION 1..220: note = Synthetic
TWEDVKLLAAFYSLLSQAAATGDEEVLRMAQELLEKAEEAAKRGDKEKLKKLARQVELLQLFLKLILKAAKTGDEDVIEMAKRLLKKAVQYTARGDDEKLQKLARQVELLILFLELIEKAEKTGDEEVIKMAKKLLKKFVEATARGDDEKLQHLANLVEALIAFLKLIEKAKKTGDEEVIEQAKRLLKKAVEYTARGDEEALARLALEVMLMLSDLETKE

SEQ ID NO: 2418 - protein, 220 aa, synthetic construct
  REGION 1..220: note = Synthetic
SAEQYKLLSVFDQLKIAAKKTGDEEVIRMAQELKEKAEEYTKRGDDEKLKKLARQVELLLLFLKLIMKAAKTGDEEVIEMARRLLKKAVQATQRGDDEKLQKLARQVELLILFLELIELAEATGDEEVIEMAKRLLKKAVQATARGDDEKLQYLATLVELLIAFLKLIELAKKTGDEEVIEAAKRYLEKAVEYTARGDLDALAALAYWVTLAAYKLKLKH

SEQ ID NO: 2419 - protein, 220 aa, synthetic construct
  REGION 1..220: note = Synthetic
SEDATELLRLFDELIERAKKTGDEDVIRMAKELKKKAEEYAKRGDWEKLFTLAMLVYHLILFLKLILKARETGDEEVIEMAKRLLKKAVEATARGDEEKLHKLARQVELLILFLELIELAKKTGDEEVIEMAKRLLKKAVEATARGDDSKLQKLARQVELLILFLKLILLARKTGDEEVIKWAKKLLKKAVQYTARGDDEALQFLAAQVAYLIALLEKKE

SEQ ID NO: 2420 - protein, 264 aa, synthetic construct
  REGION 1..264: note = Synthetic
TEEEQRRADEYAERAWKKLKELDKEYKEKGDPLAAKLVDTALKLVLKLLEVLARGDKEKIRQLILQIRALLYAFAAFEKLAELRQEYKETGDPMAKKLMETAERLVEKLLEVLERGDEEKIRQLIEQIRALLYAFRAFQLLQELAQEYKETGDPQAAKLMETARRLVEKLLEVLEKGDEEKIRQLIEQIRALEYAFRLFQKLQELAQEYKEKGDPQAQELMETARRLVEKLLEVLDRGDEEKIKELIMRIKYLHVLFWLFERRQ

SEQ ID NO: 2421 - protein, 221 aa, synthetic construct
  REGION 1..221: note = Synthetic
SLTELAKLAEAVAKMIKQIKAAGDSESAEFLFRVFEQIYKLVAKGDIEKAIAYAKLAILFARVVQMIEQIRKAGDSESTEFLERVLKQIRELQKAGDIEKAIKLAKLALSFARVTQMIEQIRAAGDEESTEFLERVLKQIERLQAEGDIEKAQKLASLAVLFAKVTQKIKEIRAAGDKESTEELEEVLRQIERLFKAGDIEEALTLALLALMRAMLTQLKK

SEQ ID NO: 2422 - protein, 224 aa, synthetic construct
  REGION 1..224: note = Synthetic
SEEDTERLEEMLTLIWKIFELVQQLGDPKLVREAQRLVKRLTEAYKRGDKRTIEQLLRLVRMFYLIAQIFQLVEELGDPKLLEQAKRLLERLKSAQERGDDRTIEQLLRLVALTYLIAQIFQLVEQLGDPALLEQAKKLLKRLKEAQERGDDRTIEQLLRLVKMFYLIAHIFQLVRKLGDPRLLEQAERLLEALKEAQERGDDETIKELFVKVMFLALEAQATT

SEQ ID NO: 2423 - protein, 224 aa, synthetic construct
  REGION 1..224: note = Synthetic
TEEEEALLRWFQTLLAKFDELVKQLGDPRLLEEARRLQERLEEAKKRGDKRTIKQLAALLQMFVLIAQIFQLVEELGDPKLLEQAKRLLERLKEAVERGDEETIKELLDLAHMTYLIAQIFQLVEQLGDPRLLELAKELLKRLKEAQERGDRRTIERLLRLVQMTYLIAQIFQLVRQLGDPRLLETAKTLLTLLKLAFEEGDELLIKSLLTLVAETYRQAAAEQ

SEQ ID NO: 2424 - protein, 224 aa, synthetic construct
  REGION 1..224: note = Synthetic
KEEEKEQFLQAIYLMALASNAAMALGDPRFIAQVLKLVKQLAAAWRKGDERKIQAIRRLAEALYLMLQAAKLAREMGDPAFIEFVERLLQKLQEAQEKGDERKIEEILKLALALYLMLLAWFAAEKMGDPKFIEFVKRLLEKLKRAFEKGDEKKIEEIYALALALAQMLTAAQAAREMGDPRYREKVKRLLEQLDRAVKAGDEDKIDKILLRATLLALELALAK

SEQ ID NO: 2425 - protein, 224 aa, synthetic construct
  REGION 1..224: note = Synthetic
SVEELEQLLEAQTLMTRAALLAEQMGDPDFIAFVEELQRQLEEAERNGDEEKIQEIRRLAEALYLMLQAYQLAETMGDPSFIAFVRRLLEKLQAALEKGDKRKIEEILKLAEALYLMLQAYLIAEKMGDPAFIEFVKRLLEKLEEAEKKGDERKIEEILKLAKALYLMLHAYLLALEMGDPRDREKVERLLEQLKRAEKSGDEEKILRILLRAYHLALRLEEKR

SEQ ID NO: 2426 - protein, 224 aa, synthetic construct
  REGION 1..224: note = Synthetic
SEIDAILFEIAKKLVAKILKLAKELGDPRMRTAAEQLKRAIEQVERDGDKKKLFALMSFAHAFYLALQIYKLAKELGDPRMVAAAEQLLEQIQRVYEAGDLSKLNQLIKFAEAFYWVLLIYKLAKELGDPRMVEIAEQLLEQIQRVLEAGDERKLEQLIKFARAFYWVLLIYKLAKEKGDPSKLKAAEELLETIQRIQETGDENALEALLRAAAEAYRRLAKEL

SEQ ID NO: 2427 - protein, 221 aa, synthetic construct
  REGION 1..221: note = Synthetic
SEVAALLVEILVRHAETLAKRLGDPRFIELVRELAQQVQEAKEAGDEKSLRELMLMLKVTVWVLQATKSAEELGDPRFLELVERLFEQAKRAVEAGDEKKLRELLLMLEVLWWVLEATKSAEELGDPRFIELVERLFEQALRATKAGDERQLRELLLMLRVTKAVLDATKIAQELGDPEARKLLETLFELAKKAVEAGDEDLLRALLEALKLTAWTLKVKK

SEQ ID NO: 2428 - protein, 221 aa, synthetic construct
  REGION 1..221: note = Synthetic
SEYAAYVAETLLSLVKSSAAVTGDPRFKEMAKQLEEKLKKAIARGDMSKIEEILQLLAALLLVLAVMLSARKTGDPRFKEMARQLFEELVKAIKRGDMSRIQEIYAQLVALLLVLQVMLAARETGDPRFREMARQLFEKLAKAIQRGDKDKIYDIMTKLHALLVVLQVMKTAREVGDPRDRQKARELFEELVKALQRGDSSRIKEIAARLQELLIRLKLKK

SEQ ID NO: 2429 - protein, 221 aa, synthetic construct
  REGION 1..221: note = Synthetic
TSEDAKKALDMLAKVFKSAKETGDPRFLEMAEQLWEKLEKAIKRGDKDKIEEIRQLLEALLLVLKVLKSARETGDPRFKEMARQLFEELVKAIQRGDMKRLQEIKTLLKALLLVLQVMKAARETGDPRFREMAKQLFEKLEKAIQRGDMDKIKEILALLDALLTVLQVLKLARETGDPRFRKAAEELFEELVKAIQRGDMDRIQEISLRLLFLLVKLKLTK

SEQ ID NO: 2430 - protein, 221 aa, synthetic construct
  REGION 1..221: note = Synthetic
TEAALLAALMYLSQMALAAKHMGDEESLQLAKEIKEWLAEVEKRGDAEQAKKLAELLKVLLSALTMYLLAKQMGDEKSLEQAERILKRLAEVQKQGDARQAQELLELLKVLVSALKMYQLAKAMGDEDSLELAERILERLLEVFEAGDSAQAKHLLELLKVLISALKMYLLAKEMGDEDSAKIAKKILKLLTKVWKAGDSATAKYLAKLLADAIDSLEFLQ

SEQ ID NO: 2431 - protein, 220 aa, synthetic construct
  REGION 1..220: note = Synthetic
SALEMAVWLLAVNVKALAERAGDPRMLAVAKELLEQIKEALEEGDKRKFEELYRQALIFALALAVYLLAKLVGDPRMQETAKELLEKILEVKKEGDKRKFEHLYMVALVFYLALLVYLLAKHVGDPRMRAVAKELLEKLLETKKKGDESAFHELYRQALVLYLALKVYLLAKLAGDPRKLAAAKRLLEKILELLKEGDSDKFEKLYTEASANAFELEARI

SEQ ID NO: 2432 - protein, 221 aa, synthetic construct
  REGION 1..221: note = Synthetic
TAEEFMKVFNAAREMYHLAKQMGDEDSLELAKEILERLKEVLKQGDARQAEELLELLKVLITALQMYQLAKQMGDEESLEQAERILKWLLEVQKRGDSAQAQKLLELLKVLILALQMYQLAKQMGDEESLELAERILRRLLEIFEKGDSAQAKELYLLLLVLLSALKMYQLAKQMGDEESLEKAKRILERLIRVFEQGDWRAAVELQVKLTEEIKKLEAQQ

SEQ ID NO: 2433 - protein, 221 aa, synthetic construct
  REGION 1..221: note = Synthetic
SEELLKKVEKLAKEMYELAKQMGDETSLKLAEEILERIAEVQKKGDLDAAATLYHLLLVLISALQMYQLAKQMGDEESLEQAKEILKRLYEVQRKGDLKAASEILELLKVLIAALQMYQLAKQMGDEESLELAERILRRLIEVFEKGDLDQAKHILELLKVLISALKMYQLAKQMGDEESLEKAKRILERLIRVWEKGDELAASVLLSLLEFAITELEAKQ

SEQ ID NO: 2434 - protein, 219 aa, synthetic construct
  REGION 1..219: note = Synthetic
SEELDATASEVAVLAQLADDPQLQRLAKEIVRQLKRAKEEGDEDLMRRATELAKILLTALKLLLAAKKADDPKLQKLAREIVRALLRAVAEGDEELMRRATELAKILITAFQVLYMAKLADDPRLQELAREIVKKLLRAVEEGDEDLMKRAVELAKILLHALHILLLAKKADDPELQRQVEEIVRQLLRAVKEGDEEQMEKAQTQAAVLLKRLEEELLT

SEQ ID NO: 2435 - protein, 216 aa, synthetic construct
  REGION 1..216: note = Synthetic
SEEIWKMFEEIIKKAEEAAKKGDLDKALKYLHLALLFAEVAELFEKLAELSKDSPQLKKILEMVERIIKKAFEYLEQGDTDTAKTYAELAILFARVAEKFYKLRELSKSSPQLKTILEMVLEIIEQAFAYLEQGDSSTAKTYAELALHFAHVAELFYALLELSSSSPELKAILKAVEEIIKKAFEALAQGDSKKAQFAALLAQLAAYTLFYAYKAK

SEQ ID NO: 2436 - protein, 216 aa, synthetic construct
  REGION 1..216: note = Synthetic
SEEILKMVEEILKKAKEYEKQGDEETATTYFELALLFLEVAQLLQKLKELSKTSPQLKKILEMVERIIKKAFEYLEQGDYKTAKTYAELAILFLRVAELFYKLLELSSKSPWLKKILEMVLEIIEQAFKYLEQGDSETAKKYAELALMFANVAFLFYKLLDLSSTSPELKKILEKVAEIIEKAFEYLQQGDYKAAFYYAVLANLAALKAFEAYAKK

SEQ ID NO: 2437 - protein, 260 aa, synthetic construct
  REGION 1..260: note = Synthetic
TKEEYTRIWETFKEVNRLQKRAEELGDPYAFALAQRAHELLYEAYLLWLMGNVEKMEEILKEVEKILRIVKTIIKVIELQKKAEELGDPYAYELAQRALELLKKATELLRMGNEEQMKRILKEVETILAIVETIIRIIELQKEAEELGDPYAVELAQRALELLKEATELLKMGNEEKMKKIFAEVLTILTIVETIIKLIKLQKAAEELGDPRAFRLAQRALELLKEATELLKMGNLEKMLAILLEVLHILTEVQEIIERI

SEQ ID NO: 2438 - protein, 169 aa, synthetic construct
  REGION 1..169: note = Synthetic
SAEMHKLLNLAVKLMLMVKLLGDPSAIEQAKKVWERVVELFKRNDEDRIRETITMIELLILALELLALVQKLGDPSQIAQAKAVWERVQELFRRNDLSAITETLLMIHALISALRLLELVLRLGDPEQIRKAEESWEKVTELFRRNDLTRISETNLEIMKALAKLKAEK

SEQ ID NO: 2439 - protein, 220 aa, synthetic construct
  REGION 1..220: note = Synthetic
SEELKRAEYTAKLVAELAKHLGDPKVIKLAKKILERIERMIEKGDFEKLQSILRLAKALFTAIAVLSLAKKAGDPQVIRLAKKILEEILRLIEEGDEDKLRELLKNAKALYTAIKVLLLARALGDPEVIRVAKKILEAILRMIEKGDQEKLEEILKLAKALELAIRVLLLARAAGDPRLIEKAKRILEAILRKIKKGDYEKLEEILTEAAVLLTLIKIHL

SEQ ID NO: 2440 - protein, 220 aa, synthetic construct
  REGION 1..220: note = Synthetic
SEELKRAAYTAKLVAALAKHLGDPEVIRLAEAILERIERLIKEGDFESLKEILKKAKALFTAIMVLSLAKKAGDPEVIRVAKAILEAILRMIKRGDEEKLEEILKLAKALYLAILVLLLARKLGDPEVIRVAKKILEAILRMIEAGDYEKLEAILRLAAALYTAIRVLLDARAAGDPRYIEKAKKILEKILRMIKKGDEEKLEEILTDAKVLLLLIALQK

SEQ ID NO: 2441 - protein, 235 aa, synthetic construct
  REGION 1..235: note = Synthetic
SEELSTLLRKAFEIVKKLLKLAKELGDPKTYRIALELLARVLKAFANGDKERIKEMIEIIDLLLKAIEIVKKLLELAKELGDPRTKRIAKQLLKTVLELTQNGDKEKIKEMITIAKLLLEAIEIVKALEELAEELGDPKTKRIAKQLLAKVIELTQNGDKEKIKKMINIAWLLLLAIEIVKQLLRLAKEAGDPKTEEWAKRLLEAVIDLTQNGDAERINKMIIEALLHLLAIASV

SEQ ID NO: 2442 - protein, 215 aa, synthetic construct
  REGION 1..215: note = Synthetic
SETEFLAELIREMADKIEKAAREMNNPTALELAKQIKRKVEEAGDDQDKLRTIATMASIVLAALHILSLARKMNNPQAHALAEQILKAVQEAGDDEEKLKTIAIMAEIVLLALDILKRAREMNNPTALSLAKQILQRVQEAGDDAEKLKTILIMARIVLLALEILRLAREMNNPEAKEKAEKILQLVQRAGDDSTALKVILSLAKQLLRELEEER

SEQ ID NO: 2443 - protein, 235 aa, synthetic construct
  REGION 1..235: note = Synthetic
SEEIYDLLFKALEIVFTLQRLASELGDPKLSKIALALLQRVKKLAANGDSERIKEMIEIIKLLLQAIKIVKKLEELAKERGDPKIERIAKQYLEAVKELTAKGDYEKIKEMIELLKLLLEAIEIVKTLERLAEELGDPTTERIAKQLLQKVIDLTQNGDKEKIKRLIAIARLLLMAIEIVKELLRLAKEKGDPRTTEEAKRLLKKVLKLTQNGDFERIVEAILEAVEKASKLALA

SEQ ID NO: 2444 - protein, 235 aa, synthetic construct
  REGION 1..235: note = Synthetic
SEEIELLYLHALSAVTWLQKAAEELGDPKVKKIAQALLERVKRLTANGDKDRIEEMLTIAQLLAKAIEIVKKLLELAKELGDPKTERIAKQLLQAVIALTAKGDKEKIKEMITIIKLLLEAIEIVKKLLRLAEELGDPKTERIAKQLLEKVIELTQNGDKEKIKELIAIAKLLLRLIEIVKQLLRLAKEKGDPTTLRFAELLLELVLKATQNGDKEEIKKAIERAEWNLAVIQKE

SEQ ID NO: 2445 - protein, 235 aa, synthetic construct
  REGION 1..235: note = Synthetic
SDEIRLLYLAILLHVAWLQRAADELGDPKTKRIAQQLLERVQRLTKAGDKERIEEMITIAHLLLNAIEIVKALLELAKELGDPKTERIAKQLLKKVLELTQNGDLEKIKKLIAIIKLLLEAIKIVKELLKLAEEFGDPKTKRIAKQLLEKVIELTQNGDLEKIKELITIAKLLLKAIEIVKQLQRLAEEKGDPTTEEFAKLLFELVIKMTQNGDKEEIKKLLHLLETVLKMLQKQ

SEQ ID NO: 2446 - protein, 235 aa, synthetic construct
  REGION 1..235: note = Synthetic
SEEIEKLLFEATFILLKLQWLALELGDPKLSTIAQELAERFKKLTANGDKERLKEMIELLALLLKAIEIVKKLLELAKELGDPKTERIAKELLQKVIELTAKGDKEKIKELIKLIALLLEAIEIVKELEKLAEELGDPKTKRIAKQLLEKVIELTQKGDLEKIERLIAIAWLLLLAIKVVKLLLRLAEELGDPRTEEEAKRLLKKVIELTQNGDLERILEMLWKALQKLAEIFTK

SEQ ID NO: 2447 - protein, 235 aa, synthetic construct
  REGION 1..235: note = Synthetic
SEEIEDLYFKAVMIVSTLLALAFELGDPKTLRIALELLKRVQKLTANGDKERIKEQIAIADLLLKAIEIVKKLLELAKELGDPKTERIAKQLLQKVIELTQNGDKEKIKAMIEIAKLLLAAIEIVKKLERLAEELGDPKTKRIAKQLLEKVIELTQNGDKEKIAELILIASLLYTAILIVKTLLRLAEELGDPRTTEEAKRLLEEVIELTQNGDLERILELIQRAMEKLLAIQTN

SEQ ID NO: 2448 - protein, 235 aa, synthetic construct
  REGION 1..235: note = Synthetic
STELLELSWKALEIVLKLLEKAKELGDPKTLRIAKQFLDTVAKLTKNGDYERIKEMLELLKLLLEAIDIVKKLLELAKELGDPRTERIAKQLLEKVIELTQNGDKEKIKELITILKLLLEAIEIVKKLLRLAEELGDPKTKRIAKQLLSAVIELTQKGDKEKIKKMILIAAHLLAAIEIVKQLLRLAEELGDPKTLEAAKRALKAVIELTQKGDAEKINEMIWRLAAKLWEIKRV

SEQ ID NO: 2449 - protein, 235 aa, synthetic construct
  REGION 1..235: note = Synthetic
SEALKFLLEHAKKVVEALQKLADELGDPKTKRIAQQLLERVKRLTARGDFERILKAIAIATLLLKAIEIVKRLLELAKELGDPKTTRIAKQLLEKVIELTQNGDFEKISEMIEIAKLLLEAIEIVKKLLRLAEELGDPKTLRLAKDLLEKVISLTQNGDSKKIKKLIEIIKLLLAAIEIVKQLLRLAKELGDPRTEEFAKMVLEFVLAATANGDAELLKSAIEQAEEKLRQILRH

SEQ ID NO: 2450 - protein, 224 aa, synthetic construct
  REGION 1..224: note = Synthetic
STFLKILFKSVEAMLREAYKIAAELGDPDALELVRRIEKEAERARQEGDLDTLFALQMFVKVILMLLKAYQLALEAGDPRALELVKKVLEQLKRALAEGDMDTLAELLKFVALILKLLKAYQIAQEAGDPDALELVRKILEQLKRAWEEGDSSTLKDLLLFVEVILMLLKAYKAAQKAGDPTALKKVKEILKQAKRAFEEGDSATLEVLLEVIKSILSALKRIA

SEQ ID NO: 2451 - protein, 224 aa, synthetic construct
  REGION 1..224: note = Synthetic
QHWLEEAAKKVEAMLREAQRIAEKAGDPKALELVRRIEEEAERARQEGDKYTLAALAEFVKVILMLLKAYLTAQEAGDPRALELVKKILEQALRALKEGDLSTLRFLLEFVKLILMLLAAYQTAQKLGDPKALELVRKILEQAKRALDEGDSDTLELLKTFIKVILMLLAAYETALQAGDPNALKNVEKLLDEATRALEEGDKDKLQVLLWIIAAILEALKKKQ

SEQ ID NO: 2452 - protein, 224 aa, synthetic construct
  REGION 1..224: note = Synthetic
SEWLETMFEKVEAMLREAYKIAAELGDPTALELVKRIEEEAERARQEGDWKTLAFLLHFVAVILMLLKAYQIALELGDPRALELVKKILEQAKRALEEGDMETLNRLLKFIKVILMLLKAYQAALRLGDPTALELVKKILEQLKRALEEGDSDTLEKLLLFVKVILMLLKAYETALQAGDPSALKAVKKLLKELKRAYDEGDKEALNALLAVVKAILEKLARTQ

SEQ ID NO: 2453 - protein, 215 aa, synthetic construct
  REGION 1..215: note = Synthetic
TLDKLQAWLIKLMADTIEKQAREMNNPTALELAKQIKRKVEEAGDDEEKLHTIQTMAEIVLTALEILRLAREMNNPTALELAEQILKRVQEAGDDSEKLKTIAIMAEIVLLALAILQRAREMNNPDALELAYQILQRVQEAGDDSEKLKTILIMAKIVLIALEILRLAREMNNPEALKFAKAILAAVKEAGDDQDFLKKILTAAKWLLKYLEAKR

SEQ ID NO: 2454 - protein, 195 aa, synthetic construct
  REGION 1..195: note = Synthetic
HLQELEKLKEEARKAEKEGDETTLERLKLVLEFIYLLALALVAARELGQPEYVEEIEELFEQLKRAFAEGDEDTLRRLIELVKLILMLLAAMKVAKELGQPEYLEEIQKLFEQAKRAFAEGDEDTLRRLIELVKFIHQALQAMKLAKELGQPEYLEKIQKLFEQAKRAFAEGDEQTLRELIKKVSEIIEELKRRK

SEQ ID NO: 2455 - protein, 224 aa, synthetic construct
  REGION 1..224: note = Synthetic
SEEQKKEFAKLLTLVHKVLKLAQELGDPELARQAEEFLEEADRVAANGDERALQQLMEFLKLLYLVAQVLRLAQELGDPDLFEFAKQLLRELKRVRENGDEDALRFLMELLRLLYLVAQVLRLAQELGDPELFDTAKKLLKELKRVRDNGDEDALRFLMELLKFLYAVAHVLRLAQELGDPDLLAKAKELLRQLQRVIENGDERRLTELYLELLKLAFKAHKEK

SEQ ID NO: 2456 - protein, 224 aa, synthetic construct
  REGION 1..224: note = Synthetic
SLEQALALMELHDLVHKVADLARKLGDPELHRQAEEIAEEANRVAANGDEDRLKFLMELLKLLYLVAQVLRLAQELGDPELFEQAKALLREAKRVAEAGDEDALRFLMELLRLLYLVAQVLRLAQELGDPELYKTAKELLAELKRVFDNGDEKALAVLMALLKLLALVAKVLRLAQELGDPELFAKAKELLRQLQRVRENGDMDRLLELFQELLALAKKAAKEK

SEQ ID NO: 2457 - protein, 224 aa, synthetic construct
  REGION 1..224: note = Synthetic
KEEQKALLKSLEWLVKYVLTLAEELGDPELYRQAEELLEEAKRVAENGDEEALLFLQALLAFLALVAEVLKLAQELGDPELYEQAKALLREAQRVREKGDKEQLARLMDLLALLYLVAQVLRLAQELGDPELFATAKELLKEAKRVRKAGDEDALKWLMALLRLLYLVAQVLRLAQELGDPSLFAFAKMLLKLAQKVRDSGDSLFLKSLMLLLKALLEKAKREK

SEQ ID NO: 2458 - protein, 224 aa, synthetic construct
  REGION 1..224: note = Synthetic
SEAAEVLLKSLEDLVKKVLELAEELGDPELFAQAEELLEELKRARANGDKHKLAFLQLLLELLYLVAQVLRLAQELGDPELFELAKQLLREAKRVQEAGDEDQLKQLMELLRLLYLVAQVLRLAQELGDPELFAFAKELLREAKRARENGDEDALRFLMALLRFLYLVAQVLRLAAELGDPHLFTVAKQLFKDLQEVRDRGDETALHLLLSALKKLYETALREK

SEQ ID NO: 2459 - protein, 224 aa, synthetic construct
  REGION 1..224: note = Synthetic
SEEQTQLYLELLKALWRVAVLAKRLGDPAFLNFARELLKKLEEAYKLGDEDKLRQILLALELLEIALRVLELARRLGDPAFLEQAKKLFEELVRAFELGDERRLEQILLALRLLYIALRVLELARRLGDPKFLEFAKKLFEQLQEAFELGDERRLELIELALKLLYVLLLVLEQARRLGDPRFLEEAKKLLSALEEAFALGDEKKLKEILLKLLELSVKLALNK

SEQ ID NO: 2460 - protein, 205 aa, synthetic construct
  REGION 1..205: note = Synthetic
SEALKLVALWLAELVLHYAKELGDPEFIETAKRLYKEVKHADEEQIRRIALLLKAIATALHVLALARELGDPEFLKTAKELFKKLKHADEDQIRQLMLQLRAVYLALLLLKLARELGDPEFLELIKRLFEKVKHADEDQIRKLMTFLRAVYLALQVLKLARELGDPRYHEFAKRLFAIVKHADEEAIKTLLEALKALYENLAETK

SEQ ID NO: 2461 - protein, 220 aa, synthetic construct
  REGION 1..220: note = Synthetic
SEEIEFLQAILKTALRLAERAGDEELSRQIKALLEAAERAKAEGDEKKVKKVAAIAALIAHLLKALELARRAGDEELSRLIEALLEHALQATKEGDKKRVEEVARIAELIYILLRALELARKAGDEELAKQIEALLEKALQATKEGDEKKVADVATIAALIYILLRALELARRAGDSELAKYIEALLRIALEATKEGDYALVSAAAQTAARQAEELTKKE

SEQ ID NO: 2462 - protein, 220 aa, synthetic construct
  REGION 1..220: note = Synthetic
SKEYMELLWLLVAVYAAAKQAGQEQILKAAKELLERLDRAYAEGDSRKLKEVYETAQLMFQLLEVLLLAQALGQEQILKLAEELLETILRAFREGDSKKIEEVKRTAKLMFTLLQVLKLAEEAGQEQILRQAKRLLKQVKRAFEEGDDDKIKTVEATAKLMYNLLLVLKLAQEAGQEEILEEAKRLLEELFRAFAKGDERQALEVLEWAVKATYELKSKK

SEQ ID NO: 2463 - protein, 220 aa, synthetic construct
  REGION 1..220: note = Synthetic
SAELMKLIHLLVAVVAAAKQAGQEQIAKYAKELLEAVERAYAEGDSRKIQEVYETAQLMFLLLEVLLLAQAAGQEQILKLAEELLEAIIRAFNEGDSDKIEKVKRTAELMFLLLQVLFLAEEAGQEQILRAAKRLLEQVKRAFEEGDDDKIKTVKATAYLMYNLLLVLKLAQEAGQEEILEQAKRLLEALLRAFAEGDEKKALEVLKWAAYATYELKSAK

SEQ ID NO: 2464 - protein, 211 aa, synthetic construct
  REGION 1..211: note = Synthetic
SEMIKKYIQTAAEKVLEMAEKLGDPKLIALVEEIERRLKRGGSEKELAKISAVAQILLLAAKVLRMAKELGDPELIRLVKQILKQLERGGSDEELKRIYLQAEILYLAALVLKMAKELGDPELRRLVAEILKRLQKGGSDEELKRIYLFAEILYLAAWVLAAARKLGDPRLKREVETILKALQKGGSEETLWHIALVAEELFQEALEALLK

SEQ ID NO: 2465 - protein, 220 aa, synthetic construct
  REGION 1..220: note = Synthetic
SLESTELLLLLLAVYAAAVEAGQEQILKQARELFEAVERAAKEGDSKKLKEVKETAALMFTLLLVLLEAQKAGQEQILKLAAALLEAVIRAFREGDSEKIKKVKRTAKLMLLLLKVLKLAEEAGQQQILEQAKRLLEQVKRAFEEGDDDKIKTVYATALLMYILLLVLKLAQEAGQEEVLEQAKRLLETVLEAFQKGDERQAHEVAKWAVYALYALQSKK

SEQ ID NO: 2466 - protein, 220 aa, synthetic construct
  REGION 1..220: note = Synthetic
SKENTELLLLLLAVYAAAKLAGQESIAKYARELLERVERAAAEGDSRKIQEVYETAQLMFTLLLVLLKAQDAGQEQILKLAHELLEAVIRAFEEGDSRKIEEVKRTAELMATLLDVLKLAEEAGQQQILEQAKRLLEQVKRAFEEGDEDKIKTVEATAKLMFILLLVLKLAQEAGQEEILEQAKRLLEAVLRAFQEGDEKKAHEVAKWALIALYELKKAK

SEQ ID NO: 2467 - protein, 220 aa, synthetic construct
  REGION 1..220: note = Synthetic
SKELMELLHLLLAVYAAAKQAGQEQIAKQAEELLEKVKRAYAEGDSKKLKEVKETAALMFKLLEVLLLAQALGQEQILKLAADLLEKILRAFREGDSKKIEEVKRTAELMYKLLQVLKLAEEAGQEQILKQAKRLLEAVKRAFEEGDDDKIKTVEATAELMFNLLQVLKLAQEAGQEEILEQAKRLLEALLRAFAEGDEQKAREVLEWAVKASYELKSKK

SEQ ID NO: 2468 - protein, 220 aa, synthetic construct
  REGION 1..220: note = Synthetic
SEEIMKLLQLLLAVYAAAEAAGQEQILKKAEELLEAIEKAVRKGDSRKLQEIYETAALMFLLLEVLLLAQRAGQEQILKWAEEALEKLLRAFEEGDSRKIEEVKRTAELMYLLLQVLKLAKEAGQEQILAEAARLLEAIKRAFEEGDDSKLTKVKLTAWLMFQLLLILKTAQEAGQEEILEEAKRLLEQVLRAFAEGDEDQALKVLKKASYAAYRLQNKK

SEQ ID NO: 2469 - protein, 220 aa, synthetic construct
  REGION 1..220: note = Synthetic
SEEFMSLSYLLTAVEAAAKEAGQEQIAKQAKELWERVERAYKEGDSRKIKEVTKTAELMFKLLAVLLLAQRAGQEQILKWAKEALEKLLRAFKEGDSSKIEKVERTAELMFLLLQVLKLAQEAGQQQILEQAQRLLERIKRAFEEGDDSKLTRVKLTAALMFLLLQVLKLAQEAGQEEVLEDAKRLLEQVIRAFEEGDEKQATEVLNKALKALFELKSKK

SEQ ID NO: 2470 - protein, 220 aa, synthetic construct
  REGION 1..220: note = Synthetic
SEEEMELLWLLVAVAALAEEAGQEQILKWAKEAMETLKRAFAEGDSSKVKAVYETAALMFQLLLVLLAAQKAGQEQILKLAEDLLEKILRAFAEGDSKKIEEVKRTAKLMYLLLQVLFLAREAGQQQILEQAKRLLEAIKRAFEEGDSSKITRVKLTAKLMFILLQVLKLAQEAGQEEILEEAKRLLEQVIRAFAEGDEKQAKEVLATAQKLQIHLKSKK

SEQ ID NO: 2471 - protein, 220 aa, synthetic construct
  REGION 1..220: note = Synthetic
TEEYLELSYLLTAVEALATLAGQEQIAKYARELWKKVERAFKEGDSKLIEEVKETAALMFLLLQVLALAQEAGQEQILKTAKELLDAIIRAFDEGDSKKIEEVKRTAELMFLLLQVLKLAREAGQEQILAQAERLLEELKRAFEEGDDEKITKVKLTAKLMFLLLQVLKLAQEAGQEEILEQAKRLLEQVLRAFAEGDSKQALEVLNTALKMLFDLKKKK

SEQ ID NO: 2472 - protein, 220 aa, synthetic construct
  REGION 1..220: note = Synthetic
TVEFIKLSLTLLKVYVLALEAGQEQILKEAKELHEAVERAFKEGDSKKLKEVAETAKLMFKLLQVLKLAREAGQEQILKTAAELLEAIIRAFREGDSSKIEAVKRTAELMFLLLLVLKLAQEAGQQQILEQAKRLLEELKKAFEEGDSRKIKEVYHTAYLMYLLLLVLKKAQEAGQEEILEQAKRLLEQVLRAFKAGDKDAALKVAATATKMLAELDLRK

SEQ ID NO: 2473 - protein, 220 aa, synthetic construct
  REGION 1..220: note = Synthetic
LAEFVKLSLTLLKVYKLALEAGQSSIAAQAARLQETVNRAFKEGDSKKLQEVAETAKLMLTLLKVLKLAEEAGQEQILKLAKKLLEEVIRAFREGDSSKIEKVKRTAELMFLLLLVLKLAREAGQQQILEQAHRLLKTVKRAFEEGDDRKIKEVYETAFLMYLLLLVLKTAQEAGQEEILEEAKRLLEQVLRAFAAGDKDAALEVAAEATRMLAELEARK

SEQ ID NO: 2474 - protein, 220 aa, synthetic construct
  REGION 1..220: note = Synthetic
TAEWLSLLELLFKVFKLALEAGQEEIAKQAKRLLDTLNTAFAEGDSRKIKEVTETAKLMYTLLQVLKLAQEAGQEQILKTAEKLLEAVIRAFREGDSRKIEEVKKTAWLMLLLLQVLKLAREAGQEQILQQAERLLDTVKRAFEEGDEEKLKKVAATAALMLLLLKVLKTAQEAGQEEILEQAKRLLEQVLRAFAEGDEKQAKEVSQTALDMYLKLLEKK

SEQ ID NO: 2475 - protein, 209 aa, synthetic construct
  REGION 1..209: note = Synthetic
TEEDRTVAKLLIDYAHNAAARAGDPRFIELVKQLKERLEKDRSGEDIKEIILRARAVALIIDALILAQKAGDPRFIELVERLLEQLQKDRSGEDIKEIIRRAEAVYLIIQALILAQKAGDPRFIALVEELLEKLAKDRSGEDIKEIIKRARAVYLIIAALILAQKLGDPRYIEFVERLLEKLKKDRSGSAIEKIIELAKLVYALIASAI

SEQ ID NO: 2476 - protein, 220 aa, synthetic construct
  REGION 1..220: note = Synthetic
SSELFHLFALLAKVAKAAWAAGQEQIARYANELLKRLARAFAEGDSSKIQRVYETAALMFKLLLVLKLAQEAGQEQILRTAKELLETVIRAFEEGDSKKIEEVKRTAELMYLLLLVLKLAREAGQEQILAQAERLLDELKRAFEEGDDRKIKEVYATALLMYLLLLVLKTAQEAGQEEILEQAKRLLEQVIRAFKEGDSDKIFKVILTALFMATQLAQKK

SEQ ID NO: 2477 - protein, 220 aa, synthetic construct
  REGION 1..220: note = Synthetic
STEFKVLLLLLELVLKLAKKAGQEQILKQAKELLETVERAYREGDSRKIKEVIKTASLMLALLAVLVTAQEAGQEQILKTAEELLEQVIRAFREGDSRKIEEVHKTARLMLQLLKVLKLAEEAGQEQILAQAKRLLDELKRAFEEGDERKIQEVYETAALMFLLLQVLKAAQEAGQESVLKAAKTLLEALLAAFKKGDEALLHAVAVFAEILLDELKDKK

SEQ ID NO: 2478 - protein, 197 aa, synthetic construct
  REGION 1..197: note = Synthetic
PDEYTLAKEVIKEFLEASKRGDEKTLRFIETILEAIRLLRKAKELAEKLGDPKFRELVERVFKELKRAFERGDEDQIKKILTIIRAIILLLKALDLARKLGDPKFRELVKRVFEELKRAFERGDEDQIRKILHIIRAIILLLKALFLARAAGDPRYRQKVREVFEELKRAFERGDESAILHIYAQILLIILELEEKI

SEQ ID NO: 2479 - protein, 224 aa, synthetic construct
  REGION 1..224: note = Synthetic
SEESLKEAQKALKLLVTAFKLLKETGDPRFEQTVQEIWEQLERAVKEGDERTMKLVYEAIAALILLLQAIKLLRETGDPRFEEFVEKIWEKLVRAWQEGDEETMKRVKLAIAALILLLQALKLIRETGDPRFKQFLEEIIQKLFQAWDEGDDRTMKEVYEAIAALILLLQAIKLLREVGDPRLKQKVEEIFQKLVRAWREGDESTMKAVKHEINYLIWYLKAQK

SEQ ID NO: 2480 - protein, 224 aa, synthetic construct
  REGION 1..224: note = Synthetic
SKEEFTEAQKALALLLTAFNLIEETGDPRFKATIAEIFKQLERAYKEGDSKTMKEVYEAIAALILLLQAIKLLRETGDPRFEETLEQIFEKLVRAWKNGDSTTMKRVYEAIAALILLLQAIKLIRETGDPRYEQFLEEIFQKLVKAWREGDETTMKRVKLAIQALILLLKAIKLIRELGDPRNEQKVEEIWQKLVRAWREGDEDKMAEVSFEISFLYLELLLQK

SEQ ID NO: 2481 - protein, 224 aa, synthetic construct
  REGION 1..224: note = Synthetic
TEEEKKEATKAKELLLEALRLILETGDPRAAQTLTEIVDQLEKAEKKGDEKTMKEVYEAIRALILLLQAKKLLRETGDPRFEETVEQIFEELIRAWKEGDEETMKAVYEFIQVLILLLEAIKLLRETGDPRFKQFVEEIFQKLARAWREGDKQTMREVYEAILALVLLLMAIKALRRIGDPRYEQKVEEIFQKLLRAWREGDEKQMKEVATEIFKLLTQLVLRQ

SEQ ID NO: 2482 - protein, 271 aa, synthetic construct
  REGION 1..271: note = Synthetic
SEEIKDTLKKINKLVLEVLTKALEMIKTYGDPLARLVFELAVEIWKKAAEYRRTYSEEQLKKSLEILLTLLEIALLVLKVIEAALKMIKTYGDPLARLVYELALRILEKAIEYAKHYSEEQLKKSLELLLTLLEIALLVLKVIKKAREMIKRYGDPIARLVYELAVRILEKAFEYAKKYSEEQLKKALEILKTLLEIALMVLKVLELALKMLERYGDPEAEKVYEKALEILKAAFEFEKKYSEEQLKEYLEKLAQALSELYFRLLLRAAQL

SEQ ID NO: 2483 - protein, 224 aa, synthetic construct
  REGION 1..224: note = Synthetic
DTERKAAVTYAKQLIKKAKKLAKELGDPKILEILQKLEEELERLANLSDKDRLEKILRVIEAVYLIAAALKLAQELGDPKILEILKELLKKLEELSNLSDKERLEKILLVIWLVLVIAQALKLAQELGDPKIEEILKELLKRLKELQNLSDKERLEKIALVIEAVLLIAQALKLAQELGDPTILTLLKMLLELLKKLQNLSDKERLAKLLETIKSQLEQAERDK

SEQ ID NO: 2484 - protein, 224 aa, synthetic construct
  REGION 1..224: note = Synthetic
DEERKAAVTYALQLIKKAFKLAKELGDPKILEILKKLKEELERLAKLSDKSRLEKILRVIEAVYLIAAALKLAEELGDPAILEILKELLKQLEELSQLSDKDRLEKILLVIEAVLIIAQALKLAQELGDPKIEEILKELLRALKELQNLSDKERLETILLVIKAVLLIAQALKLAQELGDPSILTLLKMLLDLLKELQNLSDKERLKKLLETIKSQLEQAERDK

SEQ ID NO: 2485 - protein, 224 aa, synthetic construct
  REGION 1..224: note = Synthetic
EEETKLAVHYAALSIEEAFKLAKELGDPKILKILKKLKEELEKLANLSDSERLERILAVIEVVQLIAEALKLAQELGDPKILEILKELLRQLEELLNLSDESRLEKILFVIRLVLLIAQALKLAQELGDPKIEEILKELLRELKELQNLSDKERLEKIALVIKLVLLIAQALKLAQELGDPRILTLLTMLLKILKKLQNLSDKESLKKLLELIKSVLEHAERQK

SEQ ID NO: 2486 - protein, 209 aa, synthetic construct
  REGION 1..209: note = Synthetic
SREERFEAMWLIAQAAAAAKTAGDPRFIELVRQLKERLEKDRSGEDIKEIIRRARAVYLIIQALLLAQKAGDPRFIELVERLLEALQKDRSGEDIKEIIKRAEAVYLIILALLLAQKAGDPRFIKLVEELLEALAKDRSGEDIAEIIARANAVYQIIRALILAQEAGDPRLLEKVERLLEKLQKDRSGEDVVKIAVEAYLLAKTIERQI

SEQ ID NO: 2487 - protein, 225 aa, synthetic construct
  REGION 1..225: note = Synthetic
TEELAAEAREAIKEALKLAKELGDPEMVRLLEELLERVQELAEAGMSESELKILLLAVHAIVAILEALKLAEELGDPKMFELLKQLLEKVAEAARAGMSLEELFVLAAAVYALVAILEALKLAEELGDPEMFRLLKELLEKIAELLRAGMSEDQLKILLLAVKAVLAILKALKLAQELGDPRQYEYLKALLEKVAELARAGMSEKDLFLLAFNITKQLKKLEKQK

SEQ ID NO: 2488 - protein, 254 aa, synthetic construct
  REGION 1..254: note = Synthetic
TDEANELLKALAYAIKVFEKAAKLGDEESLRQLAELLEKIKEAFETLLTAKDEEQQRRAKRLVKLLSALAEAIAVFLAARELGDEESLKRLAELLEEIKEAFETLKKAKDEEQQRRAATLVALLSALARVIAVFLKARALGDEESLQRLAELLEEIKKAFEILKHAKDEQQRRLAVALVNLLLLLAEVIAVFLEARAKGDEDSLRELARLLEQIKRAFEKLKKAKDESQQAKAALEVHDLVLTAQLIETALKEK

SEQ ID NO: 2489 - protein, 220 aa, synthetic construct
  REGION 1..220: note = Synthetic
SEERKKKLQYLANLVLLAAQESGDPQDIELARQLYKKAKEALEAGDERQIERILKMLKLILLAVQVLRAAQRSGDPQDIELARQLWKKAIKALEAGDESQIERILKELKLIILAVKVLKYAAESGDPQDIELARQLWEKAIRALEAGDEDKIRRIQDMLKLIILAVQVLEAARASGDPEDIRKAEELWEKAIRALEAGDSEKITHILVALELILKAVETK

SEQ ID NO: 2490 - protein, 220 aa, synthetic construct
  REGION 1..220: note = Synthetic
SEEEATKLYYLASLVKLAAQESGDPQDIELARQLYKKAKEAVEAGDSSQIKRIQKMLKLILLAVDVLRAAQRSGDPQDIELARQLWEKAIRALEAGDEEQIERIAKMLKLILLAVTVLKLAQESGDPQDIELARQLWEKAIRALEAGDEEKISRIQTELKLIILAVEVRRAAKASGDPEDIRKAEELWEKAIRALEAGDEDKILNILSALELILKKIRTK

SEQ ID NO: 2491 - protein, 220 aa, synthetic construct
  REGION 1..220: note = Synthetic
KEERMKKLRYLASLVKTAAQESGDPQDIELARQLYKKAKKALEEGDESKIERLQKLLKLILLAVKVLTAAQLSGDPQDIELARQLWEKAIRALEAGDESQIERIQKELKLIILAVKVLKHAKESGDPQDIELARQLWEKAIRALEAGDESKIEKIYTMLKLIILAVQVLRYARESGDPEDIRKAEELWEKAIRALEAGDDSKIEHILSQLTLIIEKVRTK

SEQ ID NO: 2492 - protein, 220 aa, synthetic construct
  REGION 1..220: note = Synthetic
SEEELEKLQALANKVLELARQTGDPRVAQTVAKMVATAAKALAEGDERKIRRIQKLLRLILLAVEVLRYAEQTGDPRYKEIARKMFEQALEALRTGDSRRIEDIYKKLKLIILAVQVKRYAEQTGDPRSYEILRKMFEKALEALETGDSSQIERIMELLYLILLAVQVQRAAEKTGDPSLYEEARRLFEKALEALETGDSRQIKKLLIALNLILAKLLVK

SEQ ID NO: 2493 - protein, 212 aa, synthetic construct
  REGION 1..212: note = Synthetic
TEELLARIWELQARARDQGDKEQSKMAYAALVVILALMKLAELLEELKKAGMDVSYLEELAKRIEELLKRAIEQGDEQQVAMAYYAAQVIILYAELLLLLKKLREAGMDVRYLEELARRILEQLRRAIQQGDSKQVEMAFAAAQVIILYARLLELLKKLREKGMDVRELEQLAREILELLRRALEQGDSDQVKTAASLAYYILAVALLLLKK

SEQ ID NO: 2494 - protein, 209 aa, synthetic construct
  REGION 1..209: note = Synthetic
SEIEELRARIETKAHIARLLGDEDFLKAMERLLELVELAERVARTAERLKAQGDSRIAELAERIVKQLLQAIAEGDEDKLREMKRKAELVLQAARVSETARRLEAQGDSAIAELAQRIVQQLLEAIQKGDEDKLRKMKYLAALVQIAAAVSETARRLEAQGDSSIAEKLKRVVEELLQAIQEGDEDKLTSALKKALELLTAAEESEKER

SEQ ID NO: 2495 - protein, 231 aa, synthetic construct
  REGION 1..231: note = Synthetic
HQDDFDEAVKLLLTALTLAKESQDDSELMKEIIKELFKEVVTVAAQGDAERLQQLILAIRAIVLLLKALKLAEESQDDKELMKEIIKTLLKRVVEIIRAGDDDRLKYLEKAIRAIILLLEALKLAEESQDDSELMKKIIKELAKRVVEIIKAGDESRLEQLRHAISAILLLLYALKLAEESQDDSEKDKETIRKLAERVVRIIKAGDEERLNKLALEIAAAALRLLWKKYA

SEQ ID NO: 2496 - protein, 227 aa, synthetic construct
  REGION 1..227: note = Synthetic
SIEAALLLYEAHYFMVLLELIARKTGDPLILTVAEALQRKLEEVRKSGDEEEIRLIVLLARAAWFMAKVYLIARRIGDPEIERIAKKLLKKLLEVLKSGDEKEIKLIVMLAAAAYFMAKVYLIALRTGDPEILRIAEKLWRKLEELSKSGDEKEIALILLLAAAAWAMAKVYEIAQELGDPQLLRKAKELLERLQEVSASGDEDQILKILEQAAELWSEALRRKTEK

SEQ ID NO: 2497 - protein, 200 aa, synthetic construct
  REGION 1..200: note = Synthetic
SLEQTWVLLALYFALLAASALGDPEAWETFAQLLRNIKEGRFSEEDMLKFAQVLLLLLKALELAQKLGDPQASRTVKELFKNILEGRFSAEAMRAKAWVLYILLLALRLAQELGDPQAQRTVKELIKNIQKGRFSEAQMLAAAFVLWLLLAALQLAQELGDPKAEETVRRLIANIQKGRFSEEQMMDRALKLYSTLLAKK

SEQ ID NO: 2498 - protein, 227 aa, synthetic construct
  REGION 1..227: note = Synthetic
SLEAATLLLHAEYAMTALELIAKTLGDPEILALAEKLKKKLEEVAKSGDEKEIRLIVLLARAAWFMAKFYAIARKTGDPEIERIAKKLFKKLEEVAKSGDEKEIKLIVLLAQAAYFMALLYLIAQQTGDPEILRIAEKLLKKLEEVSKSGDETEIHLIVSLAAAAYAMALLYLIAQKTGDPQLLRKAKELLKRLQEVASSGDISQIQKIVAEAFKAALEAEAAAEKK

SEQ ID NO: 2499 - protein, 227 aa, synthetic construct
  REGION 1..227: note = Synthetic
SLEAATLLVEAEYAMTALELIAKTLGDPDILRIAEKLKRQLEEVKKSGDEHEIRLIVLLARAAYFMAKFYEIALRTGDPEILAIAKKLFKKLEELATSGDEKEIKLIVLLAQAAWFMAKVYEIAQKLGDPEILRIAKKLLKKLEEVAKSGDETEIHLIVSLAKAAYAMAKFYEIALKTGDPQILRKAKELWKRLQEVSSSGDISQIQEITAQALKAALEAKATATKK

SEQ ID NO: 2500 - protein, 248 aa, synthetic construct
  REGION 1..248: note = Synthetic
SMELLFEAVEAMAAAAEIAKRLASKDSEFAAQILTLVVELLKALHEVSQSGDEREIELIVLLAKALWYMAQAFEIAQRLASKDEELAKLIQELVRKLLKRLEEVVKKGDEKEIRLIVALARALWLMAKAFEIAQRLASKDSEFAAKIQKLVKDLLKRLEEVLKSGDETEIKLIVALAYALAMMAKAFEIAQKLAAKDESAAQEIREKVKELLDRLKEVLESGDEQQIKEIVAKAFHLALKAVATMAKL

SEQ ID NO: 2501 - protein, 248 aa, synthetic construct
  REGION 1..248: note = Synthetic
SMEDLFRAVQAMMEAAEIAKRLESKDSEFAAQILTLVVELFKALLEVIKSGDEKEIRLIVALAEALWFMAKAFEIAERLKSKDEEFAKKIQELVRKLLKRLEEVFKSGDEKEIRLIVALARALWLMAVAFEIAQRLASKDSEFAEKIQKLVKKLLDRLEEVTKSGDETEIKLIVALAAALAMMAQAFQQAQKLQAKDERAAQEIREKVKELLDRLEEVEKSGDEQQIKEIVKKALLLAIKAAATTAAI

SEQ ID NO: 2502 - protein, 248 aa, synthetic construct
  REGION 1..248: note = Synthetic
SMEDLFAAARAMSAAAEIAKRLESKDSEFAAQILRLVVQLLEALLEVIKSGDEKEIKLIVLLAEALWYMAQAFEIALRLASKDEEFAKKILELVRKLLKRLEEVYKSGDEDEIRLIVALAKALWLMAVAFEIAQRLASKDSEAAEKIQRLVKRLLEALEEITKSGDETEIKLIVALAAALAAMAHAFEQAQKLASKDEDAAQEIREAVKELLKRLEEVLKSGDEQQIKEIVKKALLLAIKAAAITAKL

SEQ ID NO: 2503 - protein, 248 aa, synthetic construct
  REGION 1..248: note = Synthetic
SEVDLVTAKSAMAAAEKIAKELESKDSEAAEQIKRLVEALKRRLEEVAKSGDETEIRLIVALAEALAFMAEAFAIAQKLAAKDEDFAKKIQELVRKLLKRLEELIKKGDEKEIRLIVLLARALWFMAQAFAIAARLASKDEEFAKKIQRLVKHLLERLEEIIASGDETEIELIVLLAHALWAMAVAFEIALRLAAKDEKAAQEIREKVKELLDRLEELEKSGDKSQILSTVARFQDLAWEAKRYEEKQ

SEQ ID NO: 2504 - protein, 248 aa, synthetic construct
  REGION 1..248: note = Synthetic
TLLQLLKAYAAMLRADEIAKRLESKDSEFAEQIKRLVEQLLKALEEVEKSGDETEIHLIVLLAEALWYMAQAFEIAARLASKDEEFAKKILALVRKLLKRLEEVFKSGDEKEIKLIVHLAEALWLMAQAFEIAQRLASKDSEAAAKIQKLVKDLLAALERIIESGDEKEIDLIVALAYALWAMAKAFEIALRLAAKDEKAAQEIREKVKELLDRLKEVLESGDEQQIREIVYKAVELAVRAQLKEEKL

SEQ ID NO: 2505 - protein, 227 aa, synthetic construct
  REGION 1..227: note = Synthetic
SEEREQQLKHALQSIDAALKAAERLGDPDILRKLRELKEEIKRAFKEGDDRQLAQLLQVANAMQAILMALLAAKKLGDPENLKSLKELLAQIIQALREGDQHKLEQLLQVAEAMLLILLALLIAKALGDPENLKLLKELLEQIIRVVREGDQRQLEQLLQVARAMLLILQALQIAYALGDPSNLEHLKKLLEKLIKVLRKGDQKKLEELLRQAKLALSMLKLAALLK

SEQ ID NO: 2506 - protein, 224 aa, synthetic construct
  REGION 1..224: note = Synthetic
RETLERLIRLALKFAETMAKETGDPELKEVLRWLREQIAEAEKTGDERELRRVFLLALIIALLINAWALAAALGDPDLKEVVKRLLEEIKEALKTGDERELRRIFQLAQIIALLIHAWALALRLGDPELLEVVKRLLEAIKRALETGDERELEKVYQLAQLIYLLIQAWAMAKETGDPALKRDLKKLLEKIAEAERQGDEEALKYLLLAAKLLYRKIHTKRLTK

SEQ ID NO: 2507 - protein, 224 aa, synthetic construct
  REGION 1..224: note = Synthetic
TEYLLKTIQELLEEAARMAKETGDPELKEVVRYLREQIEAAEKTGDSRELWRVALLANIIYLLIAAWKMAKETGDPELKEVVKRLLEQIKAAEKTGDKRELLRVYLLARIIYLLIQAWKMAKETGDPELKEVVKRLLEQIEAAERTGDKRELAKVFLLAQIIYLLIAAWKMAKETGDPRLKALVKALLKLIEEALRTGDEAALLHVYNLAEKIYETIRKRAEKK

SEQ ID NO: 2508 - protein, 209 aa, synthetic construct
  REGION 1..209: note = Synthetic
REELLLTALELALKALHLAIALGQKEYLKTVAKLLEKLFKATSEDELKRLLLSLEAILLALQATELAQKLGQEEYLRTVQAIFEKLAKATSEDELKRALAKLAAILLALRATKLAQELGQEEYLRTLQELFRQLANATSEKELFAYFASLAAIYVALHATKLAQKLGQEEALRTVQKLFEKVAKATSEEQLLKLFFTLLLISFKLALTE

SEQ ID NO: 2509 - protein, 252 aa, synthetic construct
  REGION 1..252: note = Synthetic
SVEDAWTVFALATEAVKLVEEALRRSTDPRLQESLERMYKYLIKLALHAATADEEELRRALAALKVIILALRAILLVLEALNRSTDPRLQESLRQMLEELIRFAEEAATADEEEVRQAQRALKVIILALKAIKLVAEALNRSTDPRTQEALRQMLEELIQFAQRAAYADEREVRQALRALKVIIHALHAILLVLEALARSTDPREQQKLREMLEQLIRFAQEAAYADEEQVKKALYALLLIQLKLLLIASKQ

SEQ ID NO: 2510 - protein, 221 aa, synthetic construct
  REGION 1..221: note = Synthetic
TESELHTAWQLALTIVKLAKELGDSESLELVKRAAEKVEEIQRTGDSRKIELVLKLLRAIELALRIIKLAQELGDERSQEIVERAFAQVQEIFKTGDKRKIETVLQLLRAIMLALQIIKLAQELGDEQSQAIVERAFAQVEEIQKTGDSRKIDTVLKLLEAIKHALEIIKLAEEIGDERTKEKVKKLFRKVQEILKTGDKDRITEVLLELVKLALELLLTK

SEQ ID NO: 2511 - protein, 220 aa, synthetic construct
  REGION 1..220: note = Synthetic
SSDLKLAAKMAVAFLEWAARVVGDPRLQETAKKIIEQIKRALKTGDEREIRRVLLLAELLLLIAHLLALLDKTGDPRLQETAKEIIEQILRALETGDSREIARVILLAEALSAVARLKEMLERTGDPRLEDLAEKIIEQILQALKTGDDREIRRVILLAKALEAIFRLQAMLDTKGDPNLQELAKKIIELIKRALETGDESLIRVVIKLAETLEKLAKSK

SEQ ID NO: 2512 - protein, 208 aa, synthetic construct
  REGION 1..208: note = Synthetic
LEEAVKTATHLLLEIFEKATSPQFLKLIAELWRLAREAARAGDEEQMELVLLVAKALRLLLEIEAKATSPEFKEVLRKLLQLLIEALRTGDLEQMKLVLLVAYALALLLDIERKATSPDFKKLIQKLLELAERALDTGDSHQMKLVLLVAHALAALLAIEEKATSPEFEEAIRQLLKKAEEALETGDSKKMEEVAKEAQKLLIKLAQE

SEQ ID NO: 2513 - protein, 204 aa, synthetic construct
  REGION 1..204: note = Synthetic
SEFLKIAAKVVETLLAWIRKHADPTFEEMLKLVQKLIEEALKNNDKKLVLLALAAANALLALLRIRKHADPRFKEMLQLVLELIKKALANNDLELVHLAAAAAYALAVLLDIRKHADPKFKEMLKLVLELIKEALENNDLELVQLAAFAARALAILLKIKKHADPFAKTLLDLVLKLIKAALKNNDLEAVKWAWEQALSAALLL

SEQ ID NO: 2514 - protein, 224 aa, synthetic construct
  REGION 1..224: note = Synthetic
TFEAILEVSTNYEKILKIMKKLKELGVDERDLRQIEELARQALELVKNGDEKARKLIRVALAFAKLLLLLWELEEAGVDSEDLERIKRLAKKALRLVEEGDEKAEKLIWVALVFADILRLMKELEEAGVDSRDLERIKRLARKALELIAAGDEEALVLIYVALNFARILKLMTELDRAGVDSRELQQIKERARKALELVAAGDERALLAISSAYLRALELALER

SEQ ID NO: 2515 - protein, 224 aa, synthetic construct
  REGION 1..224: note = Synthetic
SFEALVEVSTNYEKILKIMKKLKELGVDERDLRQIEELARQALELVNNGDEKARRLIRVALAFAKILLLMHELKEAGVDSEDLERIERLAQKALELVQKGDEKAEKLIWVALVFAQILKLMWELKEAGVDSRDLERIKRLATKALELVEAGDEEALFLIYVALQFARILKLMWELEEAGVDSRELQAIKERARAALELVFAGDERALAAISHAYLRALELALER

SEQ ID NO: 2516 - protein, 221 aa, synthetic construct
  REGION 1..221: note = Synthetic
SLEDSFTAFTLAVAIKDLAKDAGDPRLRETVEELIRRVQEANETGDERTLKQIIEILKAIMLALRIFLLAQKVGDPRLRQIVKELIQQVIEAEETGDEDTLKWIIAILEAIMLALKIFLLAQEAGDPRLRALVAKLIQAVIEAHKKGDEDTLAFIAAILRAIYLALKIFKLAKEAGDPRLRQKVEETIAKVLKAVETGDERQLSSIYFELLEIASELEKRL

SEQ ID NO: 2517 - protein, 221 aa, synthetic construct
  REGION 1..221: note = Synthetic
SLEDFFTALTLATAIRDLAKKAGDPRLRETVKELVARVEQAIKTGDERTLKQIIEILKAIMLALRIFLLAKKAGDPRLRQTVKELIQQVIEAEEKGDEDTLKWIILLLEAIMLALKIYLKAKELGDPRLRQLVSELIQAVIEAIRKGDESTLRYIAVLLRLIDLLLKIFKLAKEAGDPELRQKVEETIEKLLEAFRTGDERQLLKIYQELTQIASELEARL

SEQ ID NO: 2518 - protein, 221 aa, synthetic construct
  REGION 1..221: note = Synthetic
SLEKLFTAFTLASEILKLAAEAGDPRLRSAVEELVRRVEQAVATGDEKTLEWIIEILKAIMLALRIFELAKKAGDPRLRQTVEELIQQVLEAEKTGDEETLKWIILVLEAIMLALKIFLKAKEVGDPRLRQLVKELIQEVIEAEKKGDESTLRYIAALLRLIDLALKIVKLAKEAGDPRLRQKVEEAIEKLLRAKKEGDERKLAFIYHELTNIARELEDRL

SEQ ID NO: 2519 - protein, 209 aa, synthetic construct
  REGION 1..209: note = Synthetic
REELKKKAKMAAILALIHAKALGQEEYLRTVEELLRKLAKATSESELKRVLLSLEAILLALNATFIAERLGQEEYLRTVKKIFEKLAKATSEEQLERLLASLEAILLALKATWIAQKLGQEEYLRTVTKLFRKVANATSLEQLTKLLASLKAILLALKATELAERLGQEEYLRTVQELFEKVAKATSAEELAKALATLNLILLELQARE

SEQ ID NO: 2520 - protein, 204 aa, synthetic construct
  REGION 1..204: note = Synthetic
SEEMQKLFALVKKILELAKKLGDPRFVKLAKKLLDMASSGDSSEVAKAYRIAQLLLLVLQILRLAKELGDPRFMKAAEELFEMVASGDDSEVEQAYQIAQLLYLVLQILKLAKELGDPRFMAEAERLFEMARSGDESQVQQAYLIALLLLQVLAILKLAAELGDPRFERKAEELYEMARSGDKSEVTKALLTANHLQLELLFRK

SEQ ID NO: 2521 - protein, 221 aa, synthetic construct
  REGION 1..221: note = Synthetic
SEADLVSLEASALFLLKFAKKSGDPEQIRLAEELYRKAEEVKKKGDERLIREVQRMLELLWLALLILKAAEESGDPEQIRLAEELFRKASEVIETGDERQIREVYRMLQLLLLALQILKTAEESGDPEQIRLAEELFAQASRVIETGDSRQIEEVYRLLALLLLALELYKKAQESGDPDQIKLAETLFRLASKVIETGDESKIRTVARALKSLLKLLDDEK

SEQ ID NO: 2522 - protein, 221 aa, synthetic construct
  REGION 1..221: note = Synthetic
SHEEAHALLQLAVEILAVANHSGDPEQIRLAEELWKKAEEVYKTGDERLIREVYRMLQLLLLALRLLQEAEESGDPEQIRLAEELFAKASEVIETGDERQIREVYAMLALLLLALQILKTAAESGDPEQIRLAEELFKQASRVIETGDKEQIRHVALMLKLLLLALQLLKTAEELGDPEQIKKAEELFRQASEVIETGDKQQINEVALRLTYLLVLLKLTE

SEQ ID NO: 2523 - protein, 221 aa, synthetic construct
  REGION 1..221: note = Synthetic
SEEEAHALLILAVLIKALADYSGDPEQIRLAEELYRAAEEILKTGDERLIREVYRMLQLLLLALQILKKAEESGDPEQIRLAEELFAAAVEVIETGDERAIREVYAMLLLLLLALQILETAAESGDPEQIRLAEELFQQASRVIETGDEEQIRHVAAMLQLLLLALQLLKTAEEIGDPDAIAKAEELFRQASEVIERGDKQQIHEVAARLYYLLLLLKLKK

SEQ ID NO: 2524 - protein, 221 aa, synthetic construct
  REGION 1..221: note = Synthetic
SEEEAHKLLQLAVEILAVANHSGDPEQIRLAEELWRKAEEVYKTGDERLIREVYRMLQLLLLALRILQTAEESGDPEQIRLAEELFKAASEVIEKGDERQIREVYAMLLLLLLALQILKTAAESGDPEQIRLAEELFAAASRVIETGDEEAIRHVAAMLKLLLLALQLIKTAEATGDPDQIKKAEELFAQASEVIEKGDKQQIHEVALRLTYLLVLLKLTE

SEQ ID NO: 2525 - protein, 221 aa, synthetic construct
  REGION 1..221: note = Synthetic
STEELQKLEELAEKILKEAKKSGDPEQIRLAVELYKRALEVLIKGDERLIREVYRMLWLLLLALELLKLAEESGDPEQIRLAEELFRAASEVIEKGDERAIREVAAMLHLLLLALRILKTAAESGDPEQIRLAEELFAAAVRVIETGDQRQIEALALMLALLLLALKIYKTALESGDPDQIKKAEELFKEASEVIETGDEQQILEVLAKLYKLALTLWLQK

SEQ ID NO: 2526 - protein, 221 aa, synthetic construct
  REGION 1..221: note = Synthetic
REEEVEELLDLAWKIMTEAAKSGDPEQIRLAATLFKRAVKVAATGDERLIREVYRMLKLLELALAILKKAEESGDPEQIRLAEELFKKASEVIETGDQRQIKEVALMLKLLLLALQILKTAEESGDPEQIRLAEELWQQASRILETGDERQIRELATMLKLLALALHLYKTAQDIGDPSQIAKAEELFRQASEVIERGDESQIKEVYTKLLKLQAELLERK

SEQ ID NO: 2527 - protein, 221 aa, synthetic construct
  REGION 1..221: note = Synthetic
TESELEELNTLAEKILKEAKKSGDPEQIRLAATLYKRAVKIAAKGDERLIREVYRLLKLLELALKLLKKAEEAGDPEQIRLAEELFRQASEVIETGDERQIKEVALRLKLLLLALEILLTARESGDPEQIRLAEELWAQASRVLETGDERQIRELATMLWLLALALKLYKLAQEAGDPSQIAKAEELFRQASEVIETGDEQQIKEVAYKLHLLYAELYERK

SEQ ID NO: 2528 - protein, 221 aa, synthetic construct
  REGION 1..221: note = Synthetic
TEDEMQALLELAHEILDEAEKSGDPEQIRLAATLYKRAVKVATTGDERLIREVYRMLLLLLLALRIYKEAQESGDPEQIRLAEELFAKASEVIETGDQRQIKEVAAMLKLLELALQIYKTALESGDPEQIRLAEELFAQASRVIETGDERQIKELAKMLHLLALALKLYKLAQEAGDPSQIAKAEELFREASEVIETGDDQQIKEVAYKLHLLFAELYERK

SEQ ID NO: 2529 - protein, 221 aa, synthetic construct
  REGION 1..221: note = Synthetic
AVEAFQRAVELVEHALTLARKLGDPRIIALVLQLAEALLRAIAENDEDKLKQIEKFLEAALLVAQALKLAQELGDPKIIALVEQLLEALQRAVEENDEDKLAQIIQFLRAAILVAQALKLAKELGDPRIIELVKQLLEALQRAVEENDERKLQQIIKFLQAAINVAKALKLAQELGDPRIIEEVERLLKKLQEAVEENDESKLEEILLELVLALLKALLQK

SEQ ID NO: 2530 - protein, 221 aa, synthetic construct
  REGION 1..221: note = Synthetic
SEKDFTYAEALVEIALWAAKRLGDPRIIRLVKQLAEKLERAQEENDQRKLEQILQFLEAALLVANALMAAQKLGDPTIIELVEQLLEKLQRAVEENDERKLQEIIQFLRAAALVALALALAKELGDPRIIELVKQLLAQLQKAVEENDERKLQQIIAFLEAALLVAKALKLAKELGDPTIIEYVERLLDKLQEALEENDEDKLKAIILALRIALYTAESAK

SEQ ID NO: 2531 - protein, 209 aa, synthetic construct
  REGION 1..209: note = Synthetic
SEEKKMNVLLLAHDAIVSALEAGDKEIADWLWKFVKEIEERGDDRKFEELYEIALVILLALKAIKSAQEAGDEEIAETLRQQVKKILETGDSRAFRTLYEKAAVILLALKAIKSAQEAGDEEIAETLRQQVKDILEKGDLRKFRELYLKLLVIALALRAIKSAQEAGDEEKAETLRQKVKRLLEEGDSRKFKELFKEALQEYLKLLKKK

SEQ ID NO: 2532 - protein, 221 aa, synthetic construct
  REGION 1..221: note = Synthetic
SAKDFVRASELVLKAEELAEKLGDPRIIALVKQLLEKLKTALKENDEDKLKQIEQFLEAAILVAQALKLAQEIGDPTIIELVEQLLEALQRAVEENDERKLQQIIQFLRAAIAIAHALKLAQELGDPRIIELVKQLLEALQRALEENDERKLAAIAAFLWAAVLVAQALKLAQEIGDPRIIEEVERLLEKLQEAVEENDESKLLEILDQLNEAIFKARRTK

SEQ ID NO: 2533 - protein, 252 aa, synthetic construct
  REGION 1..252: note = Synthetic
SEESAIMYMSAQMALDMIDKFAKELGDPELLRLAKEIAELVARAQRTFAAGNTSKAKEQLEEIQTMLSALLALLMILKMVRELGDPELIRLAKKIIEQVSAAIRTFRAGNTKKAKEALEVIRLMLKALLILIKILQKVAELGDPELKRLAKKIIEQVSEAIETFAAGNEEKAKEKLETILLMLKALLLLLAILESAEKLGDPTLIKLAEEIKKLVSTAIETFRAGNTEAAKRMLKTILEILEHLLEFLKTTK

SEQ ID NO: 2534 - protein, 252 aa, synthetic construct
  REGION 1..252: note = Synthetic
DWEEIKLALEAAELLHKILKAVKELGDPELIRLAKKLKEQFERALRTWEAGNKEKAKELLETIRLMLQALQLLLEILKKAAKLGDPELIRLAKKIIEQVSKAIETFAAGNTKKAKEALELIRAMLEALLRLFDILQKVQEDGDPELKRLAKKIIEQVSAAIETFAAGNTKKAKEKLDLILAMLHALLLVLEILETLKKLGDPRLLEEAERIIEKVSRAIETFRAGNESEAAKKLFKILLTLLHLALNVKAQK

SEQ ID NO: 2535 - protein, 201 aa, synthetic construct
  REGION 1..201: note = Synthetic
THEILTKLVKILLKLLKEGDSEKAAQWFEFARAIQQAVEIFKQAANRGASESLLAILKKLFEKIDKLLEEGDLEKLLTTAQFLYAIARAVLIFVEARERGASEELKEILETLFRQILKLLEEGDDEKLLQTARVLYAIAEAVAIFVELRDLGASEELLEKLKQLFEKIKELLEEGDLEQLLRTATTLALAAKLVAHTLRRK

SEQ ID NO: 2536 - protein, 201 aa, synthetic construct
  REGION 1..201: note = Synthetic
TNEILTKLVKTLLKLLDEGDEEKAKQTFEVARAIEAAVEIYKQAEQSGASEELKEILKTLFEQIDKLLDEGDLEKLLKTAEFLYAIARAVLIYLALREQGASEELKEILETLFRQIKKLLEEGDLEKLVQTAQVLYAIAEAVLIYLTARDQGASEELKETLKQLFEKIKRLLEEGDLEQLLRTATKLALAAKLVQTTVDRK

SEQ ID NO: 2537 - protein, 201 aa, synthetic construct
  REGION 1..201: note = Synthetic
TVEILLTLVKELLQLTREGDEEKLRQTNEFARAIEQAVEIYKQAEQSGASEELKEILKTLFEQIKKLLEEGDDEKLLKTAEFLYAIARAVLIFVQVRHSGASEELKEILEYLFRQIKRLLEEGDLEKLKQTAEVLYAIAEAVLIYLAARERGASEEDKEKLKQLFEKIKRLLEEGDRDQLRRTAHTLALAAKLVSLKLARR

SEQ ID NO: 2538 - protein, 201 aa, synthetic construct
  REGION 1..201: note = Synthetic
TVEILLELVKQLLKLTAEGDSEKARKTHEFATAIEQAVEIFKQAEQSGASEELKKILKTLFEQIKKLLKEGDLEKLLQTAKILYAFARAVLIYVQARHSGASEELKEILETLFKQLKKLLEEGDLEKLLQTAEVLYAIAEAVKIFLDARDSGASEEDKEKLKQLFEKIKKLLEEGDLDQLRRTANLLALAAKLVSLKLRRK

SEQ ID NO: 2539 - protein, 201 aa, synthetic construct
  REGION 1..201: note = Synthetic
THEISEQLVRQLLKLYKEGDEEKAKQTQEVARAINAAVEIFEKAENRGASEELKAILKTLFEQFKRLLEEGDLEKLLTTAEFLYAIARAVLIYLNLRDQGASEELKEILETLFRQIKKLLEEGDLEKLKQTAAVLYAIAEAVLIYVEARERGASEELKETLKQLFEKIKRLLEEGDLEQLLRTATTLLLAALLVAHTLRRK

SEQ ID NO: 2540 - protein, 201 aa, synthetic construct
  REGION 1..201: note = Synthetic
TTEILKQLNKILLKLLKEGDSEKAKQWFEFAKAIHEAVEIYKAAEQSGASEELKKILKTLFEEIKRLLEEGDLEKLLKTAEFLLALARAVLIYVQARNQGASEELLEILETLFRQIKKLLEEGDLEKLVQTAKVLEAIARAVLIYLEARDKGASEELKETLKQLFEKIKRLLEEGDLEQLLRTATTLALAANLVALTLDEK

SEQ ID NO: 2541 - protein, 201 aa, synthetic construct
  REGION 1..201: note = Synthetic
LEEILDTLLKQLKKLVKEGDYEALHQTLEFLKAIAAAVEIYKQAENSGASEELKEILKTLFEQIKKLLEEGDREKLLKTAKFLYAIARAVLIYLELRESGASEELKEILETLFRQIKKLLEEGDLEKLLQTAYVLEAIAEAVLIYVRARDSGASEELKETLKQLFEKIKRLLEEGDLSALLATATALAAVAFAVQLTLERK

SEQ ID NO: 2542 - protein, 209 aa, synthetic construct
  REGION 1..209: note = Synthetic
KEEEIKAVLFAALLAIFAASEAGDEEIARKLHKELERIKKEGDLRKFQELWEKALVILLALEAIKSAQEAGDEEIAETLRQQVKRILEEGDLRKFRELYLKALVILVALRAIKSAQEAGDEEIAETLRQQVAKILKEGDLRKFYELMEKALVILAALLAIKSAQEAGDSEKAETLRQKVKRLLEAGDSRKFRELLKEAQKELLKLQKKK

SEQ ID NO: 2543 - protein, 201 aa, synthetic construct
  REGION 1..201: note = Synthetic
TAEILEELAKDLKRLKKEGDEEKLRQTEEFVTAIMDALLTALAAKQSGASEELKEILATLFEQIKRLLEEGDKEKLLKTAKVLYAIALAVAIFLALRDQGASEELLEILEELFRQIKRLLEEGDLEKLVQTAKVLYAIALAVHAFVHAREAGASEEEKEKLKDLFRKIKKLLEEGDLSQLLRTAEELAFTALAVNLKVNER

SEQ ID NO: 2544 - protein, 201 aa, synthetic construct
  REGION 1..201: note = Synthetic
TAEIIETLLKQLKRLAEEGDSEKLRKTKEVATAILEALLIASNATRSGASEELKEILKTLFEQIKRLLEEGDLEKLLQTAKVLYAIARAVLIFVAARESGASEELKEILETLFRQIKKLLEEGDLEKLLQTAAVLYAIALAVWAFVQAREAGASEELKEKLKQLFEKIKRLLEEGDLEQLLRTAEELAWTAVLVALQVNEK

SEQ ID NO: 2545 - protein, 201 aa, synthetic construct
  REGION 1..201: note = Synthetic
TAEIIEQLLKQLKTLAKEGDSEKLRKTKEVATTILEALLIATKATRSGASEELKQILKTLFEQIKRLLEEGDLEKLKQTAKILYAIARAVAIFVAARNQGASEELKEILETLFRQIKKLLEEGDLEKLVQTADFLYAIALAVDAFVQAAQAGASEELKEKLKQLFEKIKRLLEEGDLDKLLKTAEELAWTAVLVSLKLNEK

SEQ ID NO: 2546 - protein, 218 aa, synthetic construct
  REGION 1..218: note = Synthetic
SKEEFAELLKMAAALSQLFKAALRLEELGNKEAAETLFQTVREILELLAKFLNATTEEEREEARQRLEELRELVEMLLLLAKLFETAQRLEELGNKEAAEQLKRTVEEILRLIKKFQNATTEQQREEAKQRLAELYELILMLLSLATLFELAQRLAELGNKEAAERLRQTVEKILRLIAEFQNATTEQQSEEAWKELARLLFKVAYLLLKAYEEEKRQ

SEQ ID NO: 2547 - protein, 218 aa, synthetic construct
  REGION 1..218: note = Synthetic
SEEEERELEAMERELKKLFYTALRLSQLGNSEAAELLFQFVEEIKELIRQFKNATTEQEREEARDRLEKLRELVEMLLKLAELFEIAQRLKELGNEELAAQLERTVKEILKLIKKFANATTEQQREEAKQRLEELKELVDMLLALALLFEIAQSLAALGNEELAERLRQTVEKLLRLIKKFQNATTEQQSEEAAQELKRLLAAVERLLDEAYKEFAKQ

SEQ ID NO: 2548 - protein, 263 aa, synthetic construct
  REGION 1..263: note = Synthetic
SSEALEEMKKLLHLAFLVVSLAEQSGDPQLLEMARELAKQVNKISTKLLHADEEESAEARRLLQKLEKMLRILILAVKVIQLAKQSGDPRLLEMAKKLAEQVIRILRKLQNADEDEKKEADKELEKLETMLRILILAVKVIQLAKQSGDPRLLEMAKKLAEQVIRILKKLAHADEEESEEAKEELKDLYFMLDILILAVKVIQLAEASGDPRLLEKAKKLAEAVLRILAKLQNADEEESKEAKARLWELWHRLLVLIAQVEVK

SEQ ID NO: 2549 - protein, 263 aa, synthetic construct
  REGION 1..263: note = Synthetic
SEKDKTKIELAAEEIKLAVKNLLLLAKQEGDPRMLALAKEIARQVEELLKKVAKDKDHRKEALQNLKILLIAIAIALLVIELKRLAEEEGDPRMKRLAEEILKQVLELLETVKKDKDHREEALQNLKILYIAILIAILVTKLRRLAEEEGDPRMKRLAEEILKKVQELLETVRKDKDHRQEVLENLKILLIAIKIAILVTELKRLAEEKGDPSMLTLAEEILQKVQRLLETVDKDKDHRELVLAKLKALLKALKSAIHLTKAK

SEQ ID NO: 2550 - protein, 263 aa, synthetic construct
  REGION 1..263: note = Synthetic
DEKEKLKIKLAAEEIKWAVKNLLTAARQEGDPRMERLAKEIAKDVDKLLKELAKDKDHRSEALKYLKILLIAIKIAWLVIELKRLAEEEGDPRMLALAEEILKQVFELLEKVQKDKDHREEVLENLKILLIAIKIAILVTKLKRLAEEEGDPRMKRLAEEILAQVLELLKTVKKDKDHRSEALKNLKILLIAIKIAILVIELKRLAEEEGDPSMLRLAEEILQKVQRLLETVRDDKDHRDLALMILKALLKAIKSAINLVRQK

SEQ ID NO: 2551 - protein, 224 aa, synthetic construct
  REGION 1..224: note = Synthetic
TEEIERLAEEIAQMAKTLKEAADKAGNPEIKKLAEEVLQQVEELTKRNDKEALEILALAIRIALAATQLYLAAQEAGNPAILALAREVLKRLIELTKRNDKRALEILLLAIQIAQMATKLYRLAQEAGNPKILRLAKEVLKQVIELTQRNDYEALLILLLAIKIAIMATELYKLAQEAGNPSILTFAEEVLERVIELTQRNDEEALKKLLEKIWQALHLTRLKL

SEQ ID NO: 2552 - protein, 224 aa, synthetic construct
  REGION 1..224: note = Synthetic
TEEIKKLAVEILLAAHQLKVLAKEAGNPQILRLAEQVLKDVEELAKRNDYEALEILLLAIKIAIKATELYRLAQEAGNPKILALAKEVLKLLIELTQRNDKKALEILLLAIKIAIMATELYRRAQEAGNPKILKLAEEVLKQLIELTQRNDEEALKILALAIKIAAVATHLYKAAKEAGNPEILKLAEEVLARVYELTQRNDEEKLAELAEEILRASTKTEKER

SEQ ID NO: 2553 - protein, 209 aa, synthetic construct
  REGION 1..209: note = Synthetic
SEEEKALVKFLAALAINSAFEAGDDEIATQLTEFVERIKKEGDDRKFQKLYEIALVILLALAAIKSAQEAGDEEIAEWLRQAVKRILEEGDDRAFRKLYYEALVILVALAAIKSAQEAGDEEIAETLRQQVKKTLETGDLRKFAELFERALVILTALLAIKSAQEAGDEEKAETLRQKVKRLLETGDLRKFRELHEEALEELAKLQKKK

SEQ ID NO: 2554 - protein, 266 aa, synthetic construct
  REGION 1..266: note = Synthetic
SEELEKLLATSLKILKALLEVLRLAREKGDPKLLEAAAEILKDLAELSERLKSGDEETLRRAAKLLKVLLMVLRILSLAIEVEKLAKELGDPKAVEAAQRILDQALRLLQEIQSGDEETLRRAEELLKVLYMVLRIIALAIEVEKKAKELGDPTAVEAAQRILEDALRLLQKVESGDEQTLKEAQTLLEVLYMVLEIIETAIEVEKAAKKAGDPRAVEQAQRILKQALRLLRELQSGDEQTLREAKEKLFELLHTLLWILLQILLK

SEQ ID NO: 2555 - protein, 266 aa, synthetic construct
  REGION 1..266: note = Synthetic
SEELATLQAAVKAILRQAKEVERMAKALGDPKAVEAAQRILKIAKELAKRLNSGDEETLRRAAKLLKVLWMVLQIIALAILVETAAKQLGDPKAVEAAKRILTQALRLLQEIASGDEETLRRALELLKVLYMVLRIILLAIDVEKLAKELGDPDAVEAAQRILEDALRLLKKLLSGDEETLKEAQELLELLYMVLRIIALAIEVEKKAKKKGDPKAVETAQRILKQALRLLRELASGDELALKLAFILLEVLYSLLAQIAKEIDLK

SEQ ID NO: 2556 - protein, 266 aa, synthetic construct
  REGION 1..266: note = Synthetic
SEELTTVLFMVAHILTAAKVVETAAKQLGDPKAVEAAQRILEDAKELKKKLESGDEETLRRAAKLLKVLAMVLHIILLAIEVEKAAKELGDPKAVEAAQRILAQALRLLQEIKSGDEETLRRAQELLKVLLMVLRIIRLAIEVEKAAKELGDPKAVEAAQRILEDALRLLQKLLSGDESTLREAQKLLEVLYMVLRIIKLAIEVEKKAKEAGDPRAVEEAQRILAQALRLLKELKSGDEDTLKKAKTTLRLLLSKLELTKWLIALK

SEQ ID NO: 2557 - protein, 266 aa, synthetic construct
  REGION 1..266: note = Synthetic
SEELTTVLFMVALILSAAKAVETAAKQLGDPKAVEAAQRILETAKELKERLESGDEETLKRAAKLLKVLLMVLHIIFLAIEVEKAAKELGDPKAVEAAQRILAQALRLLKEVSSGDEETLRRALELLKVLYMVLRIIRLAIEVEKEAKKLGDPKAVEAAQRILEDALRLLQKLLSGDEQTLREAQELLEVLYMVLRIIKLAIEVEKKAKEKGDPRAVEEAQRILAQALRLLKELRSGDEDTLKKAKTTLRLLYHKLKLISTLLKLT

SEQ ID NO: 2558 - protein, 266 aa, synthetic construct
  REGION 1..266: note = Synthetic
SEELETVLHMVKQILTLAKAVETAAKQLGDPKAVEAAQRILEDAKELLERVKSGDEETLRRALTLLKVLLMVLAIIFLAIEVEKAAKELGDPKAVEAAQRILAQALRLLQEVKSGDEETLKRAAELLKVLYMVLRIIRLAIEVEKAAKELGDPTAVEAAQRILEIALRLLQKLSSGDEQTLKEAQELLEVLYMVLRIIKLAIEVEKKAKEKGDPRAVEQAQRILEQALRLLKELKSGDEETLKKAKSTLKLLYSKLRLISTLIELT

SEQ ID NO: 2559 - protein, 266 aa, synthetic construct
  REGION 1..266: note = Synthetic
SEEEETVRHMVKQLLEAAKAVETAAKQLGDPKAVEAAQRILEDAKELKKRLESGDEETLRRAATLLKVLLMVLKILFLAIAVEKAAKELGDPKAVEAAQRILAQALRLLQELKSGDEETLRRAQELLKVLYMVLRIIRLAIEVEKLAKELGDPKAVEAAQRILADALALLQKLLSGDEQTLREAQELLEVLYMVLRIIYLAIEVEKKAKEKGDPRAVEAAQRILAQALRLLKELKSGDEETLKKAKSTLTLLYSKLRLISWLLKFT

SEQ ID NO: 2560 - protein, 266 aa, synthetic construct
  REGION 1..266: note = Synthetic
SEEETTVQFMVALILMAAKSVEENAKRLGDPTAVEAAQRILEKAKELLKRLNSGDEETLRRAKKLLKVLLMVLRIIQLAIKVEKAAKELGDPKAVEAAQRILKQALRLLQELASGDEETLRRAEELLKVLYMVLRIILTAIEVEKLAKELGDPKAVEAAQRILELALRLLQKLLSGDEETLREAQELLELLYMVLRIIKLAIEVEKLAKKKGDPSAVETAQRILAQALRLLKELASGDEDTLKKAKTTLALLYLALAMISENLKLR

SEQ ID NO: 2561 - protein, 266 aa, synthetic construct [sequence omitted]

SEQ ID NO: 2562 - protein, 203 aa, synthetic construct
  REGION 1..203: note = Synthetic
SEELAKMLAKAEKLLKEILKLAKKLGDPQLERLAQILLEQLEEAKRTIENGSEEQVTKAAKTAAEIYQLVKALYLLARILQLAKELGDPELEELARRLLEQLLRLIETIENGSEEQATEAAKKASVIAVLVRALYLLAQILRLAKELGDPELEEKARRLLKKLKKMIETLENGSAIEAAAAAAKAHEIAEQVQKVAVEAYKKQ

SEQ ID NO: 2563 - protein, 221 aa, synthetic construct
  REGION 1..221: note = Synthetic
SEFEMKLAEKHLKKAEKLAKELGNSEFMAIVEELQRRFEEARKRGDEDRVKFLAWMANAVLILLEAYRLAKELGNEEFKQILKELLAELREATKRGDKERVRKLWQMALAVLILLEAYKLAKELGNSRFMAIVKELLERLTDALRKGDEREIRKLLRMAKAVLILLRAEKLAQELGNEEFRKDVQELLAALRRATQKGDEEAVEYLLELAAQLLKELEANV

SEQ ID NO: 2564 - protein, 209 aa, synthetic construct
  REGION 1..209: note = Synthetic
SEEDKKLVLFLAALAINTASEAGDEEIAKTLKKQVEEIKRQGDSRKFKELYFRAQVILLALAAIKSAQEAGDEEIAETLRQQVKKILEEGDLRTFKALYAKALVILLLLAAIKSAQEAGDEEIAETLRQQVKKLLEEGDDRKFFALMDEALVIYTALLAIKSAQEAGDKEKAEELRQKVLRILKTGDKRKFAELQEDANRLLRKLQKKK

SEQ ID NO: 2565 - protein, 221 aa, synthetic construct
  REGION 1..221: note = Synthetic
SSFEMAHAETILRLAATLAKALGNEEFKKIVEELLRRLEEAKKRGDEDRVRFLLQMAKAVLILLEAYALAKKLGNEEFMQIVRELLRELQQATARGDESRVRKLLLMAKAVLILLEAYKIAKELGNERFMEIVKELLERLADAKRRGDEDEVAKLVLMAQAVLMLLRAEKKAQELGNEEFRKEVQELLDKLVEATRRGDEEAVAKLHAAAAEVAWKLEAER

SEQ ID NO: 2566 - protein, 204 aa, synthetic construct
  REGION 1..204: note = Synthetic
SEFERKVTKSMVEAAKRRLAKIRKLAKELGNETLRQLAEQIKKTLEELERILDENKDAAREAVFQIVTMLAVVEAVLLLAQILKLAEELGNEELLELAEQILKALQKLLEITRKNKDAAREAFKQILTMLAVVRALLLLAQILKLAEELGNEELYKWAEDILRKLQKLLEITLKNKDAADDAAIKIYVLLLIVKSVLAQAKAQK

SEQ ID NO: 2567 - protein, 204 aa, synthetic construct
  REGION 1..204: note = Synthetic
SEAERKNTATLVEKAKRTLAKIQKIADELGNEKLRQLAEQIRKALEELERITKENKDAAEEAKFQIVTMLAVVEAVYLLAKILQLAYELGNEDLLELAEQILKTLQELLEITLKNKDAAYEAFKQILTMLAVVRAVLLLAQILKLAEELGNEELYKLAEKILKKLQRLLEITRENKDAADEAAAKIYVLLIYVKTTLERAKQQK

SEQ ID NO: 2568 - protein, 204 aa, synthetic construct
  REGION 1..204: note = Synthetic
SEFERAIFEDQVETAKRILAKIRKLAKELGNEKLRQLAEQIKKALEELERITKENKDAAEEAKWQISTMAAVVEAVLLLAQILKLAEELGNEELWELAEQILKTLQELLEITLKNKDAAREAFKQILTMLTVVRALLLLAQILKLAEELGNEDLYKYAEKILKKLQRLFEITRENKDAADDAAAKIWSLLTYVKALLAKAKAQK

SEQ ID NO: 2569 - protein, 202 aa, synthetic construct
  REGION 1..202: note = Synthetic
TERELKTTILKILMELLKIYEKNKDAAREASAQLKLMSAVLHAVKLLEQILRLAAELGNETLWRLAEQILKTLHELLEITRKNKDAAREARRQIKTMLTVVQALLALAEILKLARELGNETLWELAEQILKTLEELLQITRRNKDKAEEARKQIEYMHVVVSMLLLLADILKTAREEGNEELWETAQRMLETLKRLLEKYRK

SEQ ID NO: 2570 - protein, 202 aa, synthetic construct
  REGION 1..202: note = Synthetic
EEDELTTKILKVLAELLKIYEANKDAAREAEAQLYTMAVVYTAVLLLAQILRLAAELGNEKLWRLAEQILKTLDELLEITRKNKDAAEEARRQIKTMLTVVRAVLLLASILKLAAELGNETLWELAEQILKILEELLQITRRNKDAAEEARKQIEWMWVVVVIVHLLAKVLKTAREKGNEELWELAQRILETLKRLLEAQRK

SEQ ID NO: 2571 - protein, 226 aa, synthetic construct
  REGION 1..226: note = Synthetic
SEEDYKKMAEAVNLAQRVAELAEKMGDEELFKLAAALIKELARLTKEGDSEQLDQVLTMIKALLLAAEVLRLAAEMGDEDLLEFAKRLIQQLRRLLEEGDKEAIAQVYTMIEALLLAAEVLRLAKELGDSKLSEAAKRLIKQLIRLLEEGDKSQIEQVYTMIAALLSAAEVLALAYKMGDEELLKEAQKLIEQLLELLEKGDKDKIAEVAVRIMELQLKALLKQFT

SEQ ID NO: 2572 - protein, 226 aa, synthetic construct
  REGION 1..226: note = Synthetic
DSLEEQLMRYATEVAKAVLELAKKMGDSKLLELAKRLLEELERLKREGDEEQIKFVLTMVEALLLAAEVLRLANEMGDDDLRELAERLIKQLIRLLEEGDKEQLKQVYTMIAALLLAAEVLRLAAEMGDSKLLELAKRLIKQLKRLLEEGDKEQIEQVYTMIAALLLAAEVLRLAAEMGDEELLKAAKHNIEALKRLLKDGDEDKIKKVYTAIAKLLALAKTKAKK

SEQ ID NO: 2573 - protein, 224 aa, synthetic construct
  REGION 1..224: note = Synthetic
EEDELKEKLKRKLDKLLEALTKKGDSRASEALHLIEKLFEALEILAKAQELAERLGNEDFLKIVKKLLQALLRALEILDKTGDSRAEERLEQILKLAKAVLILLEAYKIAKELGNEKFLELVRRLLKELERMLEILEKTGDSRAEEELEQILRLAKALLILLRAYKTAKELGNEELLELVRQLLEKLLDMLEKLKKTGDSRAKKALATIHNLAAAVLIALKLVK

SEQ ID NO: 2574 - protein, 224 aa, synthetic construct
  REGION 1..224: note = Synthetic
EEREIEQKLNEESKEAAEILEKTGDSRAEEQQTLIAKLLEALLILLEAKLLAEKLGNEDFLKIVAELLQELLRMLEILKKTGDSRAKEALEQILRLAKAVLILLEAYKIALELGNEKFQEIVRRLLKELRRMLEELRKTGDSRAKEALALILLLAKAVLMLLRAYKIAKELGNEQFLQKVRELLEKLLKMLEKLKKTGDKRAKSALIQIFFAAAKVLLELKKEK

SEQ ID NO: 2575 - protein, 222 aa, synthetic construct
  REGION 1..222: note = Synthetic
SSLELTIAEAHYLLWKIALAAAQAGDEKIKELVELAFRLVEEAERAGDEQQIRLALLILKAILLLIEVARMAQEEGDEKIKELVKQAIEIVKRALEAGDEKQIRLALEILKAIKLLIEVKRMAKEEGDEKIKELVEKAIEIVKTALEAGDEEQIYLAVAILKAIKLLIEVTEKAKKEGDEEVLKLVEEAIEIVKQALDKGDMSLIKKAASALLQILVKLTKK

SEQ ID NO: 2576 - protein, 224 aa, synthetic construct
  REGION 1..224: note = Synthetic
EEKELAEDLARAAKEAFEILRKTGDSRAERKLEQILRLSEALEILRQAQETAEKLGNEDFLKIVAWLLKELKRMLERLKKTGDSRAEEALEQILKLAKAVLILLEAYKIAKELGNEKFLEIVRRLLKELLRMLEILAKTGDSRAREALEQILRLAKAVLILLRAYKIALELGNEEALATVRELLQALLELLEKLKKTGDSRAKEALKKILKLAQMVLSMLKAEK

SEQ ID NO: 2577 - protein, 224 aa, synthetic construct
  REGION 1..224: note = Synthetic
ESDEIKQKLREKEHKATATLMKTGDERAQEALFWIYVLKAAVKILEAAQELAERLGNEDFLAIVAELLQELLRMLEILDKTGDSRAKKALQLILQLAEAVLILLEAYKIALELGNEKFLEIVRRLLKKLRKMLEKLKKTGDKRAAIELNIITMLAKAVLILLRAYKIAKELGNEQYLQKVRELLQKLLEMLEKLDKTGDKRALEQLLEIYRQAAEVLKALEKEK

SEQ ID NO: 2578 - protein, 243 aa, synthetic construct
  REGION 1..243: note = Synthetic
SESAETELKALLVIAAVVAEIVRATGAGVEHAQTLLEQIARMIELWKKHGDEKAKEYAKKLVELLHLISAALKVLKTLKKTGAGVEVAEKLFKRILRMIELWLRHGDEEALEHAKKLVELLELIAKALEVLKFLKAVGAGVELAEKLFQRILEMIERWLEHGDEKAKEQAKKLVALLELIAKALEVLETVKKTGAGVELATTLFKLILKAIELWLEHGDEDAFKLAEELVKALKNIADALKDK

SEQ ID NO: 2579 - protein, 243 aa, synthetic construct
  REGION 1..243: note = Synthetic
EEIEKTLLAALHQIAQFVLETVKKHGAGVEHAQELFERIERMIELWKRHGDEDARAYAFKLVDLLLLIAKALEVLEKLKKAGAGVEQAEKLFQRILRMIELWLKHGDEEAAEQAKKLVELLELIAKALEVLETVKKTGAGVEQAEKLFQRILKMIERWLEKGDERAKEQAKKLVELLELIAKALKVLATVKKTGAGVETAQSLFELILRLIEAWLKHGDETAKKVAAKLVEALERIAKEQKKS

SEQ ID NO: 2580 - protein, 243 aa, synthetic construct
  REGION 1..243: note = Synthetic
SEREKWELLNLYVKAVEVALKAREYGAGVEHAQELFEQIERMIELWKRHGDERAKEYAKKLVELLELIAKALEVLERLKRTGAGVEQAEELFQRILRMIELWLRHGDEEAKETAEKLVELLELIAKALAVLATLKKTGAGVEVAEKLWQRILQMIERWLKHGDEDAKEHAAALVQLLELIAKALEVLKTVKKTGAGVEEAQRLFEKILEMIDRWLRHGDEDAALTAHLLVLKLEAIARKQKKK

SEQ ID NO: 2581 - protein, 243 aa, synthetic construct
  REGION 1..243: note = Synthetic
EEREKEHLKLLLTLAKWVLKLVKKTGAGVEHAQELFERIERMIELWKKHGDERAREQAHALVNLLLLIALALKVLQRVKKAGAGVEQAEKLWKRILRMIELWLRHGDEEAAKHANALVELLLLIAKALEVLETLKKTGAGVELAEKLFKRILEMIERWLKHGDEKAKEQAKKLVELLELIAKALEVLATVKKTGAGVEEATAFFKLILESIDRWLRHGDEDAKFQAELLVYLLELLAKELKKK

SEQ ID NO: 2582 - protein, 252 aa, synthetic construct
  REGION 1..252: note = Synthetic
SLAEEAKFAHAVAQVEEILELARELGDPQTYEEALRILEALEEMFRLVKKKGDEEAKRRLDALNTLLKALNLVLRILKLARELGDPKTHEEAARILSELQEMFRRWEKHGDEEAAEQLKLLIKLLEALLLVLQILKLAAELGDPETYEQAERILEAVLEMFRRVRKHGDERAKEQLKQLLQLLEALLLVLQILKLASALGDPLTYKLAEKILSAVQEAFERWQRHGDEDAAKELETLLKILKTLLANLKTRQ

SEQ ID NO: 2583 - protein, 252 aa, synthetic construct
  REGION 1..252: note = Synthetic
SEEEDAEFLEALLMVKHILHNAAALGDPQTYEEAERILKQLEEMFRLVKEKGDEEAKRRLAELFQLLRLLALVLQILRLARELGDPKTYEEARKILEELQEMFRRVEKHGDERAKEALKLLVALLEALLLVLQILKLARELGDPKTYEQAERIFEALIEMFRRWFKHGDSEAEERLKLLIALLEALLLVLQILKLAAELGDPDTYEAAERIFDQLLEMFERYLKHGDEDARKELLKLFAELYRLLMELEQRK

SEQ ID NO: 2584 - protein, 255 aa, synthetic construct
  REGION 1..255: note = Synthetic
SEEEYKSHQAIAEALKWVKQVLRLAKEAGDKTMLKLAKQILKQIKKILKLVAKHNDSRAVEQAKSLAAIAEAAYWVLQVYRLAKEAGDKTMLELAEKIIEQIQRIFELVQKHNDSSAVEQAKSLAQIASAAYWVLQVEQLAKEAGDKTMLTLAKRIIEQIKRIFERVQKHNDSRAVEQAASLAAIASAAYWVLQVWQLAAEAGDKEALEQAERIIKKIFEIFELVQKHNDSSAVKTAKLLALHAWIAALLLALLK

SEQ ID NO: 2585 - protein, 255 aa, synthetic construct
  REGION 1..255: note = Synthetic
SEERAKSHKAIAEALKWVRQVLRLAKEAGDKTMLELAKAILKQIEKILKLVSKHNDSSAVEQAKSLAQIAEAAYWVLQVWQLAKEAGDKTMLKLAEKIIEQIARIFELVAKHNDSKAVEQAKSLAAIASAAYWVLQVYQLAKEAGDKEMLRLAEAIIEQIARIFERVQKHNDSKAVEQAESLAKIASAAYYVLQVHRLAKEAGDKEALENAERIIKKISKIFELVQKHNDSKAVATAELLALHAFLVAELLKLKQ

SEQ ID NO: 2586 - protein, 222 aa, synthetic construct
  REGION 1..222: note = Synthetic
SELELTIAEAHYALWAIALAAAQAGDEKIKELVELAKRIVDEAAKAGDAQQIRLALLLLEAILLLIEIKRMAQEEGDEKIKELVEQAIEIVKRALEAGDEKQIRLALDILKAIKLLIEVKRMAQEEGDSKIKELVEKAIEIVKRALEAGDKSQIAFALMILKAIKLLIEVLRKAKKEGDEEVLKLVEEAIEIVKRALDEGDYSQILKAASTLLAILVKLTKK

SEQ ID NO: 2587 - protein, 255 aa, synthetic construct
  REGION 1..255: note = Synthetic
SEEQLESLKAIQEAQKWVEQVYRLAAEAGDKLMLKLAKQIMDQIEKILERVAKHNDSKAVEQAKSLARIAEAAYWVLQVWQLAKEAGDKTMLALAEKIIEQIYRIFELVQKHNDSTAVEQAKSLAAIASAAYWVLQVEQLAKEAGDKKMLELAKKIIEQIARIFEQVQKHNDSRAVEQAKSLAAIASAAYWVLQVWQLAKEAGDKSMLEEAERIIDKIAEIFELVQKHNDKQAVAAAAFLALKASFAYYKLQTEQ

SEQ ID NO: 2588 - protein, 255 aa, synthetic construct
  REGION 1..255: note = Synthetic
SDEQTRSKFAILLAYSAVVAVADLAKKAGDKTMLALAKEILEQIERIEELVAKHNDSSAVELAKSLAEIAKAAAWVLKVWQLAKEAGDKTMLELAEKIIEQIFRIFKLVQKHNDMRAVEQAKSLAQIASAAYWVLQVYQLAAEAGDKLMLRLAEKIIEQIARIFERVQKHNDSRAVEQAHSLAQIASAAYWVLQVLQLAREAGDKTALKLAEKHLKLIAAIFEMVQKKNDSTAAALAQELAKSAKTLYELLLEKQ

SEQ ID NO: 2589 - protein, 255 aa, synthetic construct
  REGION 1..255: note = Synthetic
SEEQAKSNFAIQYANAALMAVETAAKKAGDKTMLALAKQIAAAIRRIQKLVAKHNDSKAVEQAKSLAAIAEAAAWVLKVWQLAKEAGDKTMLELAEKIIEQIFRIFQLVQRHNDSSAVEQAKSLAAIASAAYWVLQVYQLAKEAGDKLMLKLAEKIIEQIYRIFERVQKHNDSSAVEQAKSLAQIASAAYWILQVLRLAKEAGDKKALQFAENIIKLIATIFEMLQKHNDSEAAKMAQELAKLAKTAYELLQEKQ

SEQ ID NO: 2590 - protein, 295 aa, synthetic construct
  REGION 1..295: note = Synthetic
SEEQKKETEKANDLVRKILKLAAKLARKTGDSTAKRIVTLAYEIFTQVKRMAEIVRHGSEDQIREALARLKQLIEVLRALLLVAKILLLAAELREQTGDETAEKIFELAVRILEQVERMFRIVQHGSEDQIREALARLRQLIEVLRALLLVAKILQLAKQLEDQTGDSTARKIFELARRILEQVIRMFKIVQNGSEEQIKEAEERLKQLILILKALLIVAKILQLAKALKEKTGDETAERIFERARRILEKVERMWKIVQHGSEEEIRQALKKLEKLLQELSELLVTALYLQAAK

SEQ ID NO: 2591 - protein, 295 aa, synthetic construct
  REGION 1..295: note = Synthetic
SEEQEKEFEKALEIVLEILKLAAKLAKATGDSTAKRISKLAEEIFKQILRMWAVVKHGSEEQIKEALKRLEQLIEVLRALLLVAKILLLAKELRDQTGDETAEQIFRLAVRILEAVERLFRILLHGSEEEIREAEKRLEQLIEILRALLLVAKILQLAKELEEQTGDETARKIFALARRILAEVQRMFDIVQHGSEEQIREALARLRQLILFLRLLLLVAEILQLAKKLKETTGDEAADRIFEAARRIFEKIERMWKIVLHGSEEEIRQALEKLKELAAKLYELLVEALARLSQK

SEQ ID NO: 2592 - protein, 227 aa, synthetic construct
  REGION 1..227: note = Synthetic
SEERLETFLEAADAIWKVLVAARDDPEIYRIAAEIWKEAQELAEEGSEDAEKRLKQILTVAKALLFILQVKKTARDDPEIYRIALEIAEQAIRLWEEGSEKAMEQLKKILTFAAALLFILQVKKAAKDDPEIYRIAEELAEEAIRLWEEGSERADEALKFIYIFAIALLLILQVLKKARNDPEIYREAREIAEKAIRLFEEGSEEALRKLFLIISNAYQLLLELELK

SEQ ID NO: 2593 - protein, 230 aa, synthetic construct
  REGION 1..230: note = Synthetic
PESDELATKLLKELKRLHKTLWNGSEEEVKEAAKQVKQIEAVLKALDLAEEARKKARDDPAVAELAKQLLEELDRLFEILRNGSEEQQEEAQRQVEQILIVLKALVLLLKALEKARNDPDVLELAKKLLAELIKLFQKLRNGSEEEQERAIRWVEQILIILEALLLALAALEKARDDPESYRTAKELLKNLKELFEILRNGSEKQQKTAAALLKSIAIILRLLLKRLKKQ

SEQ ID NO: 2594 - protein, 230 aa, synthetic construct
  REGION 1..230: note = Synthetic
PESEELERKLKEEQKRLSEIVRNGSKEEVKEALRQSKQIYAVLVALALLEEARTKARNDPDVAELLKQLLEQLARLFEILRNGSEEQQEEAQRQVEQILIVLKALLLALKALEKARNDPAIYKLAKKLLKELLKLFQKLRNGSEEEQERAIRAVERILIVLEALLLALLALEKARNDPESYRKAKELLERLRKLFEILRNGSEDQQTHALLAVLFIILTLKKLLSELKKK

SEQ ID NO: 2595 - protein, 230 aa, synthetic construct
  REGION 1..230: note = Synthetic
PESEELERKLKEEQKRLEKISANGSKEEVKEALTKQKQIYAVLVALLLAEEARTAARDDPAVAELAKQLLEQLKRLFEILRNGSEEQQKEAQRQVEQIYIVLEALLLALQALKKARNDPLVAELAKKLLKELFKLFETLRNGSEEQQERAIRKVEQILIVLEALLLALKALEKARKDPESLRKAKELLARLKKLFEILRNGSEDQQTQALLAVLFIILELKKLLSELKKK

SEQ ID NO: 2596 - protein, 260 aa, synthetic construct
  REGION 1..260: note = Synthetic
SELLAASEAVLVKLALETAYRLALRTGDPAIVETVKKLLETARELIEIMALGDSRAEKAKDRLKKIELAAKVLILLLQAYELAERLGDPKILETVKRLLEAAVELIEIMRLGDSRSKDATERLKKIALAARVLILLLQAYETAERTGDPAIAETVKQLLEQAVKLIEIMRLGDSRSKDAYAALHAIEWAAKVLILLLEAYKLAKETGDPRILEKVKKLLRRALELIQIMRLGDDRAKDALEQLLKIAAKAEELIRRLRAK

SEQ ID NO: 2597 - protein, 222 aa, synthetic construct
  REGION 1..222: note = Synthetic
SETELTISEAEQALWEVELAALRAGDSKILELVEKAKSIVDEAKKAGDEQQIRFALAILRAIKLLIEIKKMAEEEGDEKIKELVEQAIEIVKRALDAGDEEQVRLAELILKAIKLLIEIKRMAAEEGDEKIKELVELAIELVKRALEAGDKHQIKLVLLILRAIKLLIEVKREAKKKGDEEILRLLEEAIELVKRALEAGDWSQISTAAQFLLKILLRLTAK

SEQ ID NO: 2598 - protein, 221 aa, synthetic construct
  REGION 1..221: note = Synthetic
SEVVFFVVDFSIKLVLEMADETGDPRAQEIATQLQKRLEEVARKGDEERAKEMYKLAQVLLLILKILKLARETGDPKAQEIARQLLQELAKVFEKGDLSRAEEMSILAAVLYLILQILQLARQTGDPTAEEIARQLLAELARVVETGDLRRAEEMSILARVLYLILQVLQLARETGDPDALKFAKTLLKLLAAVQETGDLHAAKWLESAAKHLYEKLQSTK

SEQ ID NO: 2599 - protein, 221 aa, synthetic construct
  REGION 1..221: note = Synthetic
SLEKLFEASEILAQVLKMAKAAGDPTLLEIAKRLSKRLTEIAKKGDMSKLEHLIRIVRALLALARVLLMAKAAGDPVLLEIAKRLAKKLLEILKKGDSEALKRLIEIVKALELLARVLLMAKAAGDPVLLEIAHRLAKKLLEILKKGDMEALKRLLEILKALLALARVLLAAYAAGDPELLRRAYELAKALLEILKKGDMDQLKKLMKEVFLLLHEAMLRK

SEQ ID NO: 2600 - protein, 221 aa, synthetic construct
  REGION 1..221: note = Synthetic
REDEVRKLKRLAKYVEAQARQLGNPELLKIAEQLKQTLKEIEEKGDMDRLKFILRVVELALKAANVLSLAKAAGNPDLIEIAERLIKQLLRILEEGDSSRLKFILRVIDLALTAAEVLLLAKEAGNPQLLEIAERLIKQLLRILQEGDSSRLEEILAVIRLALLAAEVLKAAKEAGNPRLLEKAKRFIEQLLRILKKGDMSQLEKIAMELLRAYNQALQQR

SEQ ID NO: 2601 - protein, 248 aa, synthetic construct
  REGION 1..248: note = Synthetic
DEEQKTDIKWLALAIKSAKKAAEKVGNPKLVEAAERLQEELERLKKLLEEGDSRAKEELDALLLIVELLQLIATAFDLALKAGNPTLREAAKRLMEELLRLLRLLQKGDSRALEELKQLLLIVRLLILIAKAFLLAKEAGNPTLQEAAERLMKELLRLLRLLQKGDERALEELEELILIVKLLVLIAKAFLLAKKAGNPELLAFAEELMKRLLALLRRLQNGDSRALKELKKLIELIEQLVRSAAEEV

SEQ ID NO: 2602 - protein, 248 aa, synthetic construct
  REGION 1..248: note = Synthetic
KTEQKIAIWLLEYAIKTAKRLAEKAGNPELLEAAERLQRELERLKKLLAEGDERALEELEQLLAIILLLVQIASAFLLALAVGNPTLIEAAERLMKELLRLLRLLQKGDERALKELEALLLIIQLLQLIAEAFLLAKKAGNPTLQEAAERLMKELLRLLRLLQKGDERALRELEQLILIVKLLVLIAKAYLLAKKAGNPKLQAYATALMEMLLKLLRMLQEGDERALKLLKFMLLLVEHFVKTAAAEV

SEQ ID NO: 2603 - protein, 240 aa, synthetic construct
  REGION 1..240: note = Synthetic
SLEDKLDILAAKHLASAIEEAAKKAGDPTLLEIVEQAKRILEKIERHASDDRMRELLKFLRAILKAAALAAKIYLLAKKAGDPTLLEIVERAVEKLLELTRHASDSRLKDELKELLLLLRAAYLAASIKILAEKAGDPTLLEIVKRAVEQLLRLTRHASDSRAQEQLKELILFLRAAYLAAKIYLLAKKAGDPSLLTLVELAVELLLELTRHASDKRMLEKLKKLIEFLAEAAASAEERI

SEQ ID NO: 2604 - protein, 240 aa, synthetic construct
  REGION 1..240: note = Synthetic
SEEELAELTTALALAAFIEAAARRAGDPTLLEIVKQAKRRLKELARHASDSRVRKQLKELRAILYAAYLAASIYLLALKAGDPTLLEIVKRAVEQLLRLTRHASDERMAEQLKRLILILKAAYLAASIYLLAEAAGDPTLLEIVKRAVEALLKLTRHASDSRMLEALKKLLMILYAAYAAASIKLLAEAAGDPDLLRKVEEAVEQLLRLTRHASDSRMEEQLLKLAFKLSFALVAAKAKK

SEQ ID NO: 2605 - protein, 220 aa, synthetic construct
  REGION 1..220: note = Synthetic
TDELLELDTKVTNIYAIAVEANDPALLEAVERLKKKAEEIKKRGDEEELERLLRLVELMLNIAKIWLLASDANDPKLKEQFKRLLEKAKQILEKGDDEALRFLLMLVKLMLNVAKIYLLALEANDPTLLEFVERVLEKATQIQKRGDEEELARLLKLVYLMLNVAQIYKLAREANDPRLEQWVKEFLEKAKQIAERGDDEALEELARQVTFALMRARKQL

SEQ ID NO: 2606 - protein, 223 aa, synthetic construct
  REGION 1..223: note = Synthetic
SAEDKVLLLLVKLLVNEIKVAAETEGSEDMKKIAEHIERILKEAERAGDSKAVEFAYELAEVLKLVFAVLKAAKETGSEEMRKIAKTILKQLLRAVETGDSKQVKFAKLLATVLLLVFEIFAAAKKIGSETFKKIADQILKELLRASETGDLEAVAWAYLLALVLRLVFRILEAAKKKGSEELKQKAEKILEQLLRASETGDESQVWKAFHAALRLAYEFEKL

SEQ ID NO: 2607 - protein, 223 aa, synthetic construct
  REGION 1..223: note = Synthetic
SLEFLKLLLTVYHLVLAVKVAAKKLGSEEMKKIAEEIERQLAEAERQGDLRAVEFAYLLAEVLWLVFQVLVAARKTGSEEMKKIAEHILKTLLRAVETGDLRQVEFAYLLAEVLLLVFAILQAAKELGSETMKKIADQILKQLLRAVETGDSSQVKYAWLLAHVLWAVFQVLEAARKTGSEEDKQKAKKILEQLLRAVETGDLRLVYEAALQAHALLATFEEK

SEQ ID NO: 2608 - protein, 222 aa, synthetic construct
  REGION 1..222: note = Synthetic
DELEKLIEAAMHALAKVLLMAREEGDSKLLELVKLALEIVKEAKRAGDEDQIRLALLILEAIALLFEIKRMAEEEGDEKIAELVEQAIERVKRALEAGDEKQIRLALLILRAIKLLFEVKRMAEEEGDSKLKELVELAIEIVKRALEAGDEQQIRLALLILEAIKSLIAVTRAAKEEGDEEILRLVEEAIEIVKKALEAGDERQIKEAQRTLLEILVRIFEK

SEQ ID NO: 2609 - protein, 223 aa, synthetic construct
  REGION 1..223: note = Synthetic
SLEFLKLLLTVYQLLLAVLVAARKTGSEEMKKIAEAIFRQLEEAERAGDSEKVAFAYLLAEVLLLVFQIFQAAKETGSEEMKKIAKAILKQLLRAVETGDKKQVEKAYLLAEVLWLVYQILEAAKELGSEEMKKIAKQILKTLLRAVETGDQSQVAFAWLLAHVLWAVFQVLKAAREAGSEEDKAKADKILKQLLRASETGDLRLVYEAALQAHTLLAAFEEK

SEQ ID NO: 2610 - protein, 259 aa, synthetic construct
  REGION 1..259: note = Synthetic
SLLEVLKAVEKLLKRALALAASSDEQEHRKAKKLLETAWLIQQVLSSLYEAKRLAEEIEKQGDEEQAKKLKAVVEYVERLVKRAAKLAASSDEREHEKAEELLKTAFLIALVLKSVATAWQLAKEIEAQGDKEIAELLKQVVNAVIELVLRAAELAASSDKSEHKKAQELIKTAFAIAHVLISVAKAWELAKRIEEQGDSEEAEKLKREVKKVIETVLRAAELALSSDEDEHRKADKAIKLAALAANKLVLKATAKEEA

SEQ ID NO: 2611 - protein, 259 aa, synthetic construct
  REGION 1..259: note = Synthetic
TEEEVMKASAKLLEKAAKALASSDEDEHRKAKKLLETAEMISKVLESVAQAEKLAEEIEKQGDEEQAKLLKAVVEFVKRLVLRAAELAASSDEREHEKAEELIKTAYAIAAVLKSVAEAWQLAKEIEEQGDKEIAEKLKQVVQYVLELVYRAAELAASSDEEEHRKAQELIKTAFMIALVLISVARAWELAKRIEEQGDKEQAERLKREVKKVIETVLAAAELAASSDEREHEKAQKAILVAYAKALALIHKAKLAESK

SEQ ID NO: 2612 - protein, 259 aa, synthetic construct
  REGION 1..259: note = Synthetic
TEERVEEFVERLLKRAKELRASSDKSEVAKAIKLMLTAALIQLVLTLLKIVKKLAEEIEANGDKEQAKTLKAVVEFVIRLVLRAAELAASSDDREHEKAEELIKTAALIAAVLASVATAWALAKKIEENGDKEIAELLKQVVQLVIELVLRAAELAASSDDEEHRKAQELIKTAYLIAEVLISVAKAWELAKRIEAKGDSEKAEKLKREVKKVIETVLRAAELALSSDSDAHAEAYAAIMSAASKAMALVAEAKAAEKS

SEQ ID NO: 2613 - protein, 259 aa, synthetic construct
  REGION 1..259: note = Synthetic
TLEKVWEFVERLKKRAKELAASSDEDEQRKAKKLKETATMIAKVLKAVAEASQLATEIKEQGDKEQAEKLQQVVEFVLRLVLRAAKLAASSDEREHEKAEELIKTAFAIAAVLKAVARAWQLAKEIEEQGDKEIAELLKKVVEIVIDLVLRAAKLAASSDESEHRKAQELIKTAKKIADVLISVATAWELAKRIEAQGDKEKAAALKREVKKVIELVVRAAELAASSDEREHEKAQRLIEKALEKADQLVVKAAAASQK

SEQ ID NO: 2614 - protein, 220 aa, synthetic construct
  REGION 1..220: note = Synthetic
TEDELAEAQLVVSEIQVLATRLGDPKAKEIVRLIQELLKEARERGDERLVRLAKLLAEAMRLVAEIIELARQLGDPKAKEIARLILERLYEAAARGDSRQVKLAVLLAKAMRLVAEIIQLARELGDPLAKEIARLILELLFEAAQRGDKKKVWWAAFLAYAMKMVATIIKKAKELGDPQAKRAVKEILRRLYEAAAKGDLEAVLTAIQKAAEMLAAAHKI

SEQ ID NO: 2615 - protein, 220 aa, synthetic construct
  REGION 1..220: note = Synthetic
TEDELTLAQLDVSEILVRATKLGDPKAKEIARLIQELLKEAEERGDERLVRLAKLLAEAMRLVAEIIELAKQLGDPKAKEIARLILERLVEAAKRGDSEQIKLALLLAEAMRLVAEIIQLAKELGDPLAKEIARRILELLHEAARRGDKKLVKEAAFLAYAMKMVATIIQLAKKLGDPQAKRQAEEILRRLYEAAARGDMKAVATAIQAAATMLAQAAKI

SEQ ID NO: 2616 - protein, 220 aa, synthetic construct
  REGION 1..220: note = Synthetic
TEDELAFAQLAISEIQVHATKLGDPKAKQIVRLIQERLKEAKERGDERLIRLASALAEAMRLVAEIIELAKQLGDPKAKEIVRLILERLFEAAARGDSEQIALASLLAKAMRLVAEIIQLAKELGDPLAKEIARLILELLYEAAKRGDKKLVALAAFLAYAMKMVATIIELAKKLGDPEAKRKVKEILRRLYEAALRGDMSAIATAINEAAKMLAEAAKI

SEQ ID NO: 2617 - protein, 220 aa, synthetic construct
  REGION 1..220: note = Synthetic
TEKELAFAQLAVATIQVLATKLGDPTAKQIVRLIQELLKEAKERGDSRLIALASALAEAMRLIAEIIELAKQLGDPKAKEIVRLILERLYEAAARGDEDQVALASLLAEAMRLVAEIIQLAKELGDPLAKEIARLILELLVEAAKRGDKELVALAAFLAYAMKMVATVIKLAKELGDPEAKRKVKEILRRLFEAVARGDMDAIAKAIQAAANMLAEAAKI

SEQ ID NO: 2618 - protein, 220 aa, synthetic construct
  REGION 1..220: note = Synthetic
LEDLLFLAQVAVEYILRAAAKLGDPKAKQIARLIQERLKEAAERGDERLVKLAYALAVAMIKVAKIIKLAKELGDPLAKEIARLILERLYEAAARGDESQVRLALLLAEAMRLVAEIIKLARELGDPLAKEIARLILELLYEAAKRGDEALVRLASLLAEAMRLVAEIIQLAKELGDPTAKRFVKMILKTLYEAAARGDEDKIRKASSSAKLMLDIASET

SEQ ID NO: 2619 - protein, 189 aa, synthetic construct
  REGION 1..189: note = Synthetic
KEEEAHKLSLTLVEAVSKGDPRKLQEVVEQLIRLMKQAAKEGDKELLYYLLLLILAAALQLGDPRNIARVVKELQKQMKRAAKEGDKELLYRLLEAILEAAKALGDPRNIKAVVDTLFKLMKEAKREGDKELLYRLLKLILKAAKALGDPRNITAVMQTLLEEAKRAAAEGDSELWEKLQKAILEALRT

SEQ ID NO: 2620 - protein, 220 aa, synthetic construct
  REGION 1..220: note = Synthetic
LETDLFLAQMSIEAIQRLAAKLGDPKAKEIARLIQELLKEAAERGDESKVKLAHLLAYAMLLVAEIIELAKELGDPTAKEIARLILERLAEAARRGDESQVRLAILLAAAMRLVAEIIKLARELGDPLAKEIARLILELLYEAAARGDERLVRLASLLAEAMRLVAEIIKLARELGDPKAKRFVKMILELLYEAAAKGDERLVRKASTLAEQMLRMAKDR

SEQ ID NO: 2621 - protein, 255 aa, synthetic construct
  REGION 1..255: note = Synthetic
SAEDLLALSKIAQMLYTLLAAAERAGDPRLIELARRLLEEFKRLATKLEEDPNASEARKRLAQLYRLAKILIMLVKVLEFARQAGDPRLIELAKRLLEQIIKLAQELQEDPNAEEAQKTLEQLERLAKILIMLVQLLQFARQAGDPRLKELAQRLLEEIIRLAQELAEDPNAEEAKLKLHQLAHLAKIFIMLVKVLQYARKAGDPRQKEKAKRLLEKIIELAQELQEDPNAAEALKKLTKLAATAHFEILKVKEK

SEQ ID NO: 2622 - protein, 236 aa, synthetic construct
  REGION 1..236: note = Synthetic
KEEEETQLKLIKKAFEYLRKAVQEAGDPKLIELAEELQRQFEELKKANSERAWEQLELLSTLVAIAIAIVELLDLVRKAGDPKLIELAKKLLEQFLRLVKANSERAKEQLEQLKKLVEIAIMIVKLLQLVREAGDPKLIELAKKLLEQFLRLVKENSEEAEERLEFLKSLVEIAIMIVELLQLVREAGDPRLQEEAKRLLETFIELVKRNSERAKNALELLKLLVALAIKKVKKQQ

SEQ ID NO: 2623 - protein, 236 aa, synthetic construct
  REGION 1..236: note = Synthetic
SERAELQQKLIAKALKYLRKAVQEAGDPKLIELAEQLLRRFEELKRQNSEEAWEELQALSTLVAIAIAIVELLKLVRKAGDPKLIALAKKLLEQFLRLVKANSERAKEQLKLLKKLVEIALMIVELLELVRKAGDPKLIELAKKLLEQFLRLVEENSEEAEERLEELKKLVEIAIMLVELLLLVREAGDPRLREEAERLFETFVTLVKENSEEAKNALELLELLVRLAIKKVKKQQ

SEQ ID NO: 2624 - protein, 236 aa, synthetic construct
  REGION 1..236: note = Synthetic
SEEEEEKLRQIETMLFKLLAHVVDAGDPKLIELAFELIRRFEELKRQNSERAKEELEALKKLVEIAIMIVELLKEVREAGDPKLIELAKKLLEQFIRLVKENSERAKEQLDLLKKLVEIAIAIVQLLKSVRKAGDPKLIELAEKLLEQFLRLVKANSEEAEERLEQLLKLVTIAQAIVALLKLARRAGDPRLREEAKRLLEQFSRLVKANSEEAEEKLEKLFKAVFEALLRIYEAI

SEQ ID NO: 2625 - protein, 236 aa, synthetic construct
  REGION 1..236: note = Synthetic
SESQKAMQKEIQEMIEELRKLAAKAGDPKLRELAETLQKRFEELKRQNSESASAALALLKFLVEIAIMIVRFLLTVRKLGDPKLIELAKKLLEEFLRLVKENSEEAFKQLLLLYKLVEIAIMIVELLAAVRRAGDPKLIELAEKLLEEFLRLVKQNSEEAEERLERLKKLVEIAIMIYELLQLVREAGDPSLQEMAKRHLETFIRLVKENSEKAELQLEALYHAVAHAIKTVKAQQ

SEQ ID NO: 2626 - protein, 219 aa, synthetic construct
  REGION 1..219: note = Synthetic
TFQELLKQLKKESERLEERLKNGDEAAKEQMRELEKFLKLIEQIAKVIEAAKRAGNPELRELARQLLEQMARLWERLKRGDEKAKEQIETLFKFAQLIAQIIRVIELAREAGNPRLRELAEELLKQMKRLWERLLRGDEAAKEAIEDLYKFAALIAQIIRVIQLAREAGNPELRRAAQELLKKMYELWERLKRGDEKAKEEIELLLTQALLLYLLIAQR

SEQ ID NO: 2627 - protein, 219 aa, synthetic construct
  REGION 1..219: note = Synthetic
TFKELLEQLHEEHARLEERLKRGDEAAKRQVRALQKWLKVIFQILAVLAAAKRAGNPLLRELAQQLVEQMKRLWERLLNGDEAAKKALEELFKFAAVIEQIIRVIELAREAGNPRLRELAEALLQQMFRLWERLQRGDEKALEAIERLYKFAQVIAQIIRVIQLAREAGNPELRRAAQELLEKMRELWERLLRGDSKALEEIEHLYFQALLLYLLILQR

SEQ ID NO: 2628 - protein, 219 aa, synthetic construct
  REGION 1..219: note = Synthetic
SFKELQEKLWEELARLEERLKRGDSAAEEQVRKLEKFQKVISLILKVLEDAAKAGNPDLRELAKQLVEQMVRLFERLQRGDEAAYEAIEDLYKLAQVIAQIIRVIELAREAGNPRLRELAEQLLQQMKRLFERLARGDEAAKKQIEELFKFAQVIYLIIRVILLAREAGNPELRRAAQELLEKMRALWERLLRGDESALKELELLYMFAAMLHNHIAQR

SEQ ID NO: 2629 - protein, 219 aa, synthetic construct
  REGION 1..219: note = Synthetic
TFKELQEALAKEMKRLEERLKRGDKAAEEKVRELEKFQAVIQVILTVLKLAAKAGNPLLRELAQQLLEQMARLWERLLRGDSKALEELEKLYKFAQVILVIIRVIELAREAGNPRLRELAEQLLQQMVRLWERLKRGDEKAAEKIEELYKFAQVITVIIKVIQKAREAGNPELRRAAQELLEKMAKLWERLKNGDSAALKEIELLLFLANLLYTLIEQR

SEQ ID NO: 2630 - protein, 188 aa, synthetic construct
  REGION 1..188: note = Synthetic
SSQVELLRELIEEVRREGDERALEKLWELLKKSIKEAKEAGNLEAVVKALQLLLELVRQLGDEDKLRKLYEEAKKIIEEAQAAGNAWAVVKALAILIQLVRQLGDEKKLREMQEEAKRIIEEAQKAGNLYAVVVALKILLELVRQLGDKKQLEEMFELALKIIKEAEEAGNELAVEVAARILEALKKQ

SEQ ID NO: 2631 - protein, 204 aa, synthetic construct
  REGION 1..204: note = Synthetic
SYEAALVRAAAKSILEMAKELGQEEFLELAKQMLKEVNSGDESEIKKAYRILAVAHLALAILKLAAKLGQEEFYELAKEMFKKVLSGDDSEIKKAYAILQVAWLALLILARARKLGQEEFYELAKELFKRVLSGDDSEIKKAYRILLIALLALRILELAEELGQEEYFEFAERMLRRVASGDDATIAEVLEALKTALAQLEITK

SEQ ID NO: 2632 - protein, 219 aa, synthetic construct
  REGION 1..219: note = Synthetic
TIKELLKELEKESSRLEERLKNGDKAAEEALRDLEKFLKLIEQILKVIEKAKKAGNPLLRELAQKLLEQMARLWERLQRGDSAAKEQIEELIKFAELIEQIIRVIELAREAGNPRLRELAEALLQQMYRLWERLLRGDSAALEAIEDLFKFAAVIAQIIKVIKLAREAGNPELRRKAQELLEKMYELWERLLRGDSEAKKQIELLYSQAVLLTLLIKQR

SEQ ID NO: 2633 - protein, 219 aa, synthetic construct
  REGION 1..219: note = Synthetic
DIRELLKELLEELKRLVERAKRGDSEAEKALKNLHKFSAVIEQILKVLELAKKAGNPLLRELARQLLKQMKRLWERLKNGDESALDALEKLLKFAQLIEAIIRVLELARELGNPRLRELAEQLLQQMARLWERLLRGDSAAEEKIEELIKFAEVIIQIIRVLQLAREAGNPELRRFAAELFEKMFELWERLKNGDEEALRQIELLKQFAKLLTLLIKQN

SEQ ID NO: 2634 - protein, 219 aa, synthetic construct
  REGION 1..219: note = Synthetic
TEEELETELKKALERLNARLRNGDKAAQKAIEELLKFMAVIDQIQKVLEKAKKAGNPLLRELAQKLLEQMKRLWERLQRGDEKALEALEKLFKFAAVIAQIIRVIELAREAGNPRLRELAEQLLAQMVRLWERLLRGDEAALEQIEKLYKFAQVIAAIIRVIQLAREKGNPELRRKAKELLEQMYKLWERLLRGDSDAEALIESLLLLARFLTKEIEKR

SEQ ID NO: 2635 - protein, 219 aa, synthetic construct
  REGION 1..219: note = Synthetic
SAEELEKELTDEMTKLLLRLFHGDSAAEKQVKELFLFKTVIEQIKKVLELAKKAGNPLLRELAQALLEQMERLWERLLNGDSEALDAIFKLYIFALLIELIIRVIELARKAGNPRLRELAEQLLQQMYRLWERLARGDSSAFAAIFALMHFARVITQIIKVILLAREAGNPELRREAQELLEKMYELWKRLQRGDEEAFKQITELLKKAQKITEKIERE

SEQ ID NO: 2636 - protein, 248 aa, synthetic construct
  REGION 1..248: note = Synthetic
SQELSEIIQEALKVAYLAAELGDPRMIKTVAEFFERILKLLTSYSRDGDEEAKRKAEELLEQLKILYEALKVLKLAREAGDPEMTRTVEEFIRKILELLKSYETHGDEEALRKAEELLEQLKILYQALLVLKLAREAGDPEMTETVKQFIERILKLLQKYEKDGDEDALKKAKELLYQLSILYIALLILQEARAAGDPDMTELVEAFIRRILKLLKSYETHGDEEALKKAEALLRELLKRAFELMLRR

SEQ ID NO: 2637 - protein, 231 aa, synthetic construct
  REGION 1..231: note = Synthetic
SELLAAAKETAEAIIRLAEELGDPRVIETAKQLYRKIAELLKITSEEAMLKVLALHAFLKAIELAIRIIKLAEELGDPRVIETAKQLFERILRLTAITSEEAFAAVQRLYEILKAIELAIEIIKLAKELGDPRVIETAKKLFAQILRLLAITSEEAIEKLRQLYQILEAIRLAIEIIKLAKEKGDPSVIEAAKQLFALILAVLKITSEWAIAVVRNIAEALQRLREKIEKQ

SEQ ID NO: 2638 - protein, 263 aa, synthetic construct
  REGION 1..263: note = Synthetic
DEELRWKLFELAEKVHRLIEQAEREYRETGDPRAEQLYRTLKAIAKKIHEVSKSGDSREIKTAILLARLAELLARVLELLKEAQRDYEETGDPRAKQLYETLEEIFRKIQEVIKSGDEKEIKRALLLAALAEWLQKVLELLKEAQRKYEETGDPRAKELYETLEEIFRKIQEVIESGDEREIFAALVLAALAELLAKVLDLIKQAQRTYEETGDPRAAELYEKLVEIFEKIQEIIKSGDLDEIFKALQTLFEAHALQEKLEKK

SEQ ID NO: 2639 - protein, 263 aa, synthetic construct
  REGION 1..263: note = Synthetic
TEEDLRQLMKQQLKVNKLIAQAMRDAQTTGDPRAEQLARTLKEIARKIKEVLESGDSREIKRALLLARLAELLQRVLELLKEAKREYEETGDPRAKQLYETLEKIFRKIQEVIKSGDEEEIKAALLLAALAEQLQKVLELLKQAKRYYEETGDPRAKELYETLEEIFRKIQEVIDSGDKEEITTALFLADLAELLQTVLELLAEAQRTYEETGDPRAKELYEKLKEIFEKIQEVIKSGDLSEIYKALQLAAEAEQTVLKLREE

SEQ ID NO: 2640 - protein, 263 aa, synthetic construct
  REGION 1..263: note = Synthetic
TEELLAKLKEMLEKVLHLIAQAIAAAVFKGDPRWEQLADTLWAIAVKIVKVAESGDEREIKTAILLARLAELLQRVLELLKEAQRKYEETGDPRAKQLYETLEEIFKKILEVIKSGDEKEIKDALLLAQLAELLQKVLELLDRARELYEKSGDPRAKELYETLEEIFRKILEVIKSGDSREIKTARELAALAEHLMMVLALLKRAQRTYEETGDPRAKELYEKLKEIFEKIQEVIKSGDAREIREARELAQRALELMFELHLE

SEQ ID NO: 2641 - protein, 263 aa, synthetic construct
  REGION 1..263: note = Synthetic
TEEDLAKLEEMALKVSKLLLEAKKEYEKTGDPRAAQLARTLAAIANKIYKVLESGDSREIKKALLLARLADMLQRVLELLKEAQREYEETGDPRAAQLYETLEEIFKKIVEVIKSGDSREIKKALLLAQLAEMLQRVLELLKEAQREYEETGDPRAKELYETLEEIFRKIQEVIKSGDSREIKTARELAKLAEWLQMVLELLKKAQEYYEKTGDPRAKELYEKLKRIFEKILEVIKSGDESEIREAAKTASKAILTMLRLETK

SEQ ID NO: 2642 - protein, 209 aa, synthetic construct
  REGION 1..209: note = Synthetic
SEDDKTLAKLLAEHILELAKRMGDPEISRIAQELLERVEKGGTEEEIHRLALQIAALALAVHILKDAEEMGDPDISAFARELLERVKKGGTEEEIKRLLTQIWALALAVEILKLAEEMGDPEILKTARELLKRVKKGGTEEEIKRLLTQIEALYLAVQILKLAYEMGDPRIIKFARKLLKAVAKGGTEEKIKLLAFMIKVLFYSVKKNQ

SEQ ID NO: 2643 - protein, 200 aa, synthetic construct
  REGION 1..200: note = Synthetic
SEKEKAAETSIKLLIALARLALALAKQYGLGVEIFEELLKIVEAAARRFAFAKDKEEQERAWREAAEAVALLELILRALELLERAEQKGLGVEIFQELLRIVLEAVKQFIFAKDEEQQERMLRRAKEAVALLELILRALELLERAEQKGLGVEKFKELVKTVFAAAKEFIFAKDEMQQNLALQKAKLAVIKLELELNAQK

SEQ ID NO: 2644 - protein, 200 aa, synthetic construct
  REGION 1..200: note = Synthetic
SESQKFLAHLLELLIHTARAALALAKQKGLGVEIFEELLKIVEAAARAFAFAKDEEEQERAFRQAKTAVALLELILRALDLLERAEAKGLGVEIFKELLRIVLELAKQFIFAKDEEQQERMLRRAKRAVAILELILRAIELLERAEKAGLGVEKFKELLKIVLDAAKKFIFAKDERQQEAALLQAKNAVLELKLELANQK

SEQ ID NO: 2645 - protein, 200 aa, synthetic construct
  REGION 1..200: note = Synthetic
SEEEKVQKEYIRALIEKAKRLLARAEAKGLGVEIFKELLKIVEDAARKFAFAKDSKERAKMSLQATTAVKFLELILRALELLERAEKKGLGVEIFQELLRIVLEEAKAFIFAKDDEQQERALERAKTAVQLLELLLRALELLERAEKAGLGVEKFKALVELVLKLAKKFIFAKDETDQKVALSVAKAAVAELQRELEAQE

SEQ ID NO: 2646 - protein, 228 aa, synthetic construct
  REGION 1..228: note = Synthetic
SLEELQEQVIKKAARALKEGDERALKAIEILQKVLAQAFRMAELASKIQEKYKKTGDPRAQELSELAKQLIEAAKRAIQEGDEDKLRLIALLLRVLELAWKMLELVEKIQEKYKRTGDPRAQKLAELAREIIEKALRAIQEGDESKLRLIEILLRVLLLAWAMLELLEKIQRQYEKTGDPTFQKLSELAATVIELAEEAIKKGDETALRVIATMLKSLLRLWELQKTK

SEQ ID NO: 2647 - protein, 228 aa, synthetic construct
  REGION 1..228: note = Synthetic
EWEELLAQILKAFSRATDEGDEDALKRLELLFKVLLLAMKMEELTSKIQEKYKKTGDPRAQELSELAKQLLEAAKRAIQEGDDKKLRLLEILLRVLLLAWAMLELAEKIQEAYKRKGDPRLQKLSELATEVIEKALRAIQEGDEDALRLIEILLRVLFLAWAMQELKEKIQRQYEKTGDPTFQTLSELAAAVIENAEKAIKTGDETALRVLAEMLKLLKRAWELTKKK

SEQ ID NO: 2648 - protein, 228 aa, synthetic construct
  REGION 1..228: note = Synthetic
SLLELAKQVLTKAEKATKEGDESKKRLLELLFRVLELASKMALLAYKIQEKYKKTGDPRAQELSELAKQVIEAAKRAIQEGDESKLRLIEILLRVLKLAWEMLELQEKIQEAYKRKGDPRAQKLSELAKEVIEKALRAIQEGDESQLRLIALLLRVLKLAWAMQELLEKIQRQYEKTGDPKAQELSETAAELIEKAEKAIKEGDETKLRLIEFALRMLHNAFKLQQAK

SEQ ID NO: 2649 - protein, 228 aa, synthetic construct
  REGION 1..228: note = Synthetic
SLWELFLQLLDKWQAAVEEGDESKLTLIKILLEVLTLAHRMAQLLKKIQEKYKKTGDPRAQELSELAKQVIEAAKRAIQEGDESKLRLIAILLRVLLLAWKMLELIEQIQEKYKRTGDPRLQKLSELAKEVLEKAQRAIQEGDESQLRLLEILLRVLLLAWKMQELVEKIQRQYEKTGDPAAQKLSEFAKRVIELAERAIKEGDEWKLRLIEDLLRFLFLVFAALQTT

SEQ ID NO: 2650 - protein, 228 aa, synthetic construct
  REGION 1..228: note = Synthetic
DLFELFEQVSKKYEKAVKEGDEDKKRLLELLQRVLELAVEMFDLTSKIQEAYKRKGDPRAQELSELAKQVLEAAKRAIQEGDESKLRLLEILLRVLKLAWAMWELTEAIQEAYKRKGDPRLQKLSELAKEVIEKALRAIQEGDESKLRLIELLLRVLLLAWAMLELLEKIQEQYEKTGDPKWQELSETAAKLIEKAERAIKEGDETKLRLIEYLLRMLFKLFELLQKK

SEQ ID NO: 2651 - protein, 251 aa, synthetic construct
  REGION 1..251: note = Synthetic
SEDAQLTLQAVLTAAKLLLKAAKRAGDPEVIEAAKQLLEEIKKMIKLYEKHGDEEALRRAKQLLELIKVLILAVKLLELAREAGDPRVIEAAQQLLERIIEMIKLYLKHGDEEALRRAKQLAALFRVLILAVKLLKAARRAGDPDVIEAAQQLLEQIIEMIERYLKHGDEEALRRAKQLAALLRVLILAVKLLEYARKAGDPRIIEHAKQNLKTLIKLIKAYRKHGDEKALEAALAALENLKLLIEEVKEK

SEQ ID NO: 2652 - protein, 251 aa, synthetic construct
  REGION 1..251: note = Synthetic
SEEEKWELFKVLYAALLLLEAAKSAGDPNVIEAAKLLLERIKKMIKLYEKHGDEAALRRAKQLAALLKVLILAVELLQLARQAGDPRVIEAAQKLLERIIEMIKLYLDKGDEEALRRAEELSALLRVLIKAVKLLKLARAAGDPEVIKAAQKLLERIIEMIDRYLKHGDEDAARHAEALAFLLEVLIAAVKLLEYARKAGDPRLIEKAKQLLAKIIEMIKRYLDHGDSEALKRAAKLAAEIYALIAWVEHL

SEQ ID NO: 2653 - protein, 243 aa, synthetic construct
  REGION 1..243: note = Synthetic
SKELEFLLWALEVHVRYVKAVADKTGDPQLKELARELKKQIEEAKRARSEEELRRKLELLMMAANLAALVAAVLAIAYETGDPDLLRLAEELIEQILRALKARSEEELKELLALLLMAAKFLYLLARVLKIAYETGDPNLFALAKELIEQIERALRARSEEELKRKLALLLMAAKLAYLVAEVLKIAAETGDPKVFTFAQKLIKDIKRAQRARSEEELERLLRELLSLAKLAAWAARLLKELT

SEQ ID NO: 2654 - protein, 251 aa, synthetic construct
  REGION 1..251: note = Synthetic
SLHEYAKLLEVLLLAEELLKLAKQAGDPNVIEAAKRLYEEIKKMIKLYKKHGDEEALRRAKQLAALLKVLILAVKLLKLAREAGDPRVIEAAQQLLERIIEMIKLYLEHGDEAALRRAEQLAELLRVLILAVKLLKKARAAGDPEVIEAAQQLLERIIEMIRRYLKHGDEAALRRAHELAWLLRVLIKAVKLLELARKKGDPRVIEKAKQLLAKIIEMIKRYLKHGDEDAAVAALELAAKLDKLAEEVKKL

SEQ ID NO: 2655 - protein, 251 aa, synthetic construct
  REGION 1..251: note = Synthetic
SEEEKKWLQHVLAAAEALAKAANLLGDPNVIEAAKRLLEEIKKLIARYEKHGDEEALRRVKQLAALLEVLWLAVKLLMAAKRAGDPRVIDAAQKLLERIIEMIKLYLKHGDEDALRRARQLAQLLRVLILAVELLEFARAAGDPNVIEAAQKLLEYIIEMIRRYLEKGDEEALKRAKELEELLRVLILAVKLLEAARRAGDPRVIEKAKQLLAKIIEMIKRYLDKGDESALERANKLYYEIEVLIMELALK

SEQ ID NO: 2656 - protein, 251 aa, synthetic construct
  REGION 1..251: note = Synthetic
SEEEKTQLQKVLALAEALAWAAKQLGDPNVIEAAKRLLEELKKMIALYERHGDEEALRRVKQLAALFKVLMLAVELLMAAKSAGDPRVIEAAQQLLERIIEMIKLYLKHGDEEALRRAKELAELLRVLILAVELLEFARRAGDPEVITAAQELLEKIIEMIRRYLEKGDEKALDRAKQLAELLRVLILAVKFLEEARKAGDPRRIEEAKELLKKIIEMIKRYLRKGDEDAARAAYKLLYYLRLLITAIKLK

SEQ ID NO: 2657 - protein, 251 aa, synthetic construct
  REGION 1..251: note = Synthetic
SEEEDTELEKILALAKALAWAAKQAGDPEVIEAAKRLVEEIKKMIKLYKKHGDEEALRRLKQLAALLKVLMLAVELLQAAKRAGDPAVIEAAKQLLERIIEMIKLYLKHGDEEALRRAKELSQLLRVLILAVRLLEFARRAGDPDVIEAAQQLLEKIIEMIRRYLEKGDEEALKRLKQLEELLRVLILAVKLLELARKAGDPRDIEKAKQDLKKIIEMIKRYLEKGDEEAAKRAYEALYKLRLKITAIATK

SEQ ID NO: 2658 - protein, 251 aa, synthetic construct
  REGION 1..251: note = Synthetic
SEEEKTELKKILAAAKALAHAAKQLGDPNVIEAAKRLLEEIKKMIKKYEKHGDSEALKRLKQLAELLKVLLLAVELLMAAKAAGDPRVIKAAQQLLERIIEMIKLYLKHGDEEALRRAQELSELLRVLILAVTLLEFARAAGDPDVIEAAQQLLEKIIEMIRRYLEKGDSEALKRAKQLAELLRVLILAVKLLEAARKAGDPRLIEKAKQLLKKIIEMIKRYLEKGDESAAETAYDLLYKLRSLLSHIRLK

SEQ ID NO: 2659 - protein, 251 aa, synthetic construct
  REGION 1..251: note = Synthetic
SEEEKTELKKILAAAKALAKAAKLAGDPNVIEAAKRLLEEIKKMIKLYEKHGDEEALRRLKQLAELLEVLHLAVQLLMLAKSLGDPRVIEAAQQLLERIIEMIKLYLKHGDEEALRRAQQLSALLRVLILAVTLLEFARAAGDPNVIEAAQQLLEKIIEMIRRYLEKGDSEALRRAKQLAELLRVLILAVKLLELARKAGDPRDIEKAKQLLAKIIEMIKRYLEKGDEEAAKTAYELIYELRLLYHAIRLK

SEQ ID NO: 2660 - protein, 251 aa, synthetic construct
  REGION 1..251: note = Synthetic
SEEEKKELKSILAQAKYLADAAKLAGDPNVIEAAKRLLKEIKKMIKLYEKHGDEEALRRLKQLASLLAVLILAVQLLMAAKRAGDPRVIEAAQQLLERIIEMIKLYLEHGDEAALRRAEQLSALLRVLILAVKLLELARAAGDPNVIEAAQQLLELIIEMIRRYLEKGDEEALRRAKELAELLRVLILAVKLLEAARKAGDPRVIEKAKQLLAKIIEMIRRYRKHGDEEAAETAHELSYKIKILLMEIRLK

SEQ ID NO: 2661 - protein, 251 aa, synthetic construct
  REGION 1..251: note = Synthetic
SEEEKEELAKILAAFKALADAAKQAGDPNVIEAAKQLLKEIKKMIKLYEKHGDEEALRRLKQLAALLEVLLLAVQLKAAAASAGDPRVIKAAQQLLERIIEMIRLYLKHGDEAALRRAKQLSALLRVLILAVKLLEAARRAGDPDVIEAAQQLLEAIIEMIRRYLEKGDEEALRRAKQLADLLRVLILAVKLLELAREAGDPRIIEKAKQLLKKIIEMIKRYLKHGDEEAAKTAYELYYKLWILISTVEKK

SEQ ID NO: 2662 - protein, 251 aa, synthetic construct
  REGION 1..251: note = Synthetic
SEEEKKWLKQVLQAAKFLADAAKLVGDPEVIEAAKRLLEEIKKMIKLYEKHGDEEALRRVKQLAALLEVLMLAVELLMAAKSAGDPRVIKAAQQLLERIIEMIKLYLKHGDEAALRRAKQLAALLRVLILAVELLEFARRAGDPEVIEAAQQLLEKIIEMIRRYLEKGDEEALRRAKELAELLRVLILAVKLLEAARRAGDPRVREKAKQLLAKIIEMIKRYLKHGDEEAAETASELSYKLRILIMELRLK

SEQ ID NO: 2663 - protein, 251 aa, synthetic construct
  REGION 1..251: note = Synthetic
SEEEKKELRSILAQAKALADAAKLLGDPNVIEAAKKLLKEIKKMIKLYEKHGDEEALRRLKQLSQLLSVLHLAVQLLMAAKSAGDPRVIKAAQQLLERIIEMIKLYLEHGDEEALRRAQELSALFRVLILAVTLLELARRAGDPEVIEAAQQLLEAIIEMIRRYLEKGDEEALDRAKELSELLRVLILAVKLLEAARKAGDPRVIEKAKRLLEKIIEMIKRYRKKGDEEAAAAAHELSYKVALLLHEIRLK

SEQ ID NO: 2664 - protein, 243 aa, synthetic construct
  REGION 1..243: note = Synthetic
SEELEWIAWQLEVLLKFVDAVAKKTGDPDLKALAKELKKQIEEAKNARSEEELRRKLELLLMALKLAALVAAVLAIAYATGDPDLLRLAEELIEQILRALKARSEEELKRLLALLLMAARLAYLLARVLKIAYETGDPNLLALAKELIEEIERAQRARSEEELKRKLELLLMAAQLAYLVAEVLKIAYETGDPTLLTFAQKLIERIKRALRARSEEELERLLRELLSAASSAAHAAKLLAALT

SEQ ID NO: 2665 - protein, 251 aa, synthetic construct
  REGION 1..251: note = Synthetic
SEEEKKELKSILAQAKALADAAKQAGDPNVIEAAKRLLKEIKKMIKLYEKHGDEEALRRAKQLAALLAVLLLAVQLLAAAKKAGDPRVIEAAQQLLERILEMIKLYLKHGDEAALRRAQQLSALLRVLILAVTLLDFARAAGDPQVIEAAQQLLEAIIEMIRRYLEKGDEEALRRAKELADLLRVLILAVKLLELARKAGDPRDIEKAKQLLAKIIEMIKRYREKGDEEAAATAHELSYKLWILISTIEEK

SEQ ID NO: 2666 - protein, 251 aa, synthetic construct
  REGION 1..251: note = Synthetic
SEEEQEELFKILAAAKALLDAAKLAGDPNVIEAAKRLLEEIKKMIKLYEKHGDEEALRRLKQLAALLEVLHLAVQLLMAARSAGDPRVIEAAQQLLERIIEMIKLYLKHGDEAALRRAEQLAELLRVLILAVTLLEFARRAGDPNVIEAAQQLLEAIIEMIRRYLEKGDEKALERAKQLAELFRVLIKAVKLLEYARKAGDPRVIEKAKKLLAKIIEMIRRYLKHGDEDALRTAHELSYKLEILIHAIQEK

SEQ ID NO: 2667 - protein, 251 aa, synthetic construct
  REGION 1..251: note = Synthetic
TEEEQDTLFKILVAATYLLDAAKLAGDPNVIEAAKKLLKEIKKMIKLYEKHGDSEALKRAKQLAELLKVLLLAVELLMLARKAGDPRVIKAAQQLLERIIEMIKLYLEHGDSEALARAQELSALLRVLILAVKLLLLARKAGDPQVIEAAQQLLERIIEMIRRYLEKGDEEALRRAKQLAQLLRVLILAVKLLEYARKAGDPRVIEKAKQLLEKIIEMIKRYLKHGDEEALKTAVQLSTKLKILILEVQEK

SEQ ID NO: 2668 - protein, 189 aa, synthetic construct
  REGION 1..189: note = Synthetic
DEWVIDFIQWLLEQAEKSGDDELLRLAWKLAQELLKKAFEAGDYEFIIEVIRLILVFARQAGDDESLREARRLAQEMLKQAYERGDAEIVIKVIKLILQFAEAAGDDESLREAYRLAKEMLKQAAERGDAEILILLIALILDFAQRAGDDESLREAVRFAEEMLEEAKKRGDSLLVKLLKALLLVAKSA

SEQ ID NO: 2669 - protein, 189 aa, synthetic construct
  REGION 1..189: note = Synthetic
DEMAIDSIQWLLEQAEKLGDDELLRAAWKYAQKLLKKAQEDGDYEFLIEVIRLILEFAEQAGDDESLREAWRAAQEMLKQAFERGDAEIVIKVIKLILAFAARAGDDESLREAWRLAKEMLKEAKERGDAQILIAVIMLILTFAQLAGDDESLREAKRTAEEMLEEAKKRGDESQLTQIKLLLLVADSI

SEQ ID NO: 2670 - protein, 221 aa, synthetic construct
  REGION 1..221: note = Synthetic
PESLFMTVLKILITALLALSEGDERRFEEMLRAAKEIAEEITERAKRAGDPNLLFAAVLVIYAIALLFRKAGDESRFEEMLERARQLAERITKLAKKAGDPRLLVLAVELILLLAELFKTAGDESRFEEMLQRARELAEQITKLAEEAGDPRLLVLAVDVIIALAKLFKKAGDESRFTEMLHAAANLAAEILRLAEEKGDPRDLKRAFEVVLKIIELFTQR

SEQ ID NO: 2671 - protein, 221 aa, synthetic construct
  REGION 1..221: note = Synthetic
PESLYATVLAIIAKAMNFALAGDSSRFEEMLRQAKKLAEEITEEAKKAGDPRLLVAAVKVIIKLAELFQEAGDEDRFREMLERARQLAERITELAKRAGDPRLLVLAVDVIIALAELFQKAGDESRFEEMLQRARELAEQITKLAEEAGDPRLLVLAVDVIIKIAKLFKKAGDESRFEEMLRRAWKLLEQINRLAEETGDPRAFEEALKVNEKLAALLKRA

SEQ ID NO: 2672 - protein, 232 aa, synthetic construct
  REGION 1..232: note = Synthetic
SDSIILTIQKIINEAFAWLDKGGEEAREQVRRLMEKVERLLKKATQTAKEANDYVSVIAAISVIIQLAKLWLKYGGEQAEEKVLKLMRTVEELLKQATQWAKEANDYKSVIQAIELIIALAKLWLEYGGEEAERKVRELMRAVEELLKLALQRAKEANDYESVIKLIEVLIALAKLWLEYGGEEAEKKVKELREEVKRLLEKAFKAAAAANDYDSLKKASELYRALLELETR

SEQ ID NO: 2673 - protein, 195 aa, synthetic construct
  REGION 1..195: note = Synthetic
SAEATWLAAAVLSAALAAGLPEEEVKRLLELAKAIIQEAEEAGVSEEQIKLLMAVLIAAAEAGLPEEEIKRLVRLAQEIIQRAEEAGVSEFQITLLMLVLIAAAEAGLPYDEIKRLVELAFAIIQEAAEAGVSEEQIANLMMVLIAAARAGLPTERIEKLVRKAERIIKEAKAAGVSEEQIQELMNKLIAAALRG

SEQ ID NO: 2674 - protein, 225 aa, synthetic construct
  REGION 1..225: note = Synthetic
TENNIKAILAFVRMAAKKAGLSEEQIEQLLQEMKRLAEAITQELAEKGVSPEFVATIIWILLAVFETALKAGLSEEQIRRLLKFMSELAKRIWDELLEKGVSPEFVELIIKILLAVFLTALEAGLSEEQIERLLKEMSELAKRIWERLARKGVSPEFVALIIKLLAEVFKAALLAGLSEQQIAETLEKMSDAAEKIWEELARHGVSPEQVAKKIHEHAAKWLANQ

SEQ ID NO: 2675 - protein, 223 aa, synthetic construct
  REGION 1..223: note = Synthetic
SEEITKLLLKASEAIMIAILATDKSKADEALRQVERLLRKAEEKAAEEGDPQELLRVLLTLAFNFILIALHATDERMAKEALRQVERLLRKAEELAEESGDPQQLLEVLLTLAELFIAIAVSATDERKAKEALRQVERLLRKAEKLAAKSGDPQQLLEVLLTLAELFIQIAKKATDEAMAREAKKQVERLLKKALELAKKSGDPSQLMTVLHRLLKLFTALKK

SEQ ID NO: 2676 - protein, 189 aa, synthetic construct
  REGION 1..189: note = Synthetic
SDSAFLAASFAIVTAARRGDEEMLEAAKRIIEALLREAEALGDDEKLLQVAKLAIEVASVTGDEEMLKQAKEIIKKLLKKAEALGDERLLLKIADLAIKVAQVSGDEEMLEQAKRIIQKLIEKAEKLGDDELLLAVAELAIKVAQESGDEEMLKRAEEIIKKLAKRAVALGDKDLLEQVHRLLNALARN

SEQ ID NO: 2677 - protein, 210 aa, synthetic construct
  REGION 1..210: note = Synthetic
TWEAAKAIATALNARKEGDSRKFEEALKKALEILEEESEEAAKRGDPYKLLAVAQLFIMIAKLALEAGDKEKFDRALEEALRILEQLSRLAKELGDPKFLLNVASLFIQIAKLALEAGDEEKFKRALEEALRILKELSKEAKELGDPDLLLAVAQLFIKIAELARQAGDEDKYREAAEEAKRIVEDLAKLAEKAGDPHLLSAVLRLMAQI

SEQ ID NO: 2678 - protein, 188 aa, synthetic construct
  REGION 1..188: note = Synthetic
SEVDLMALLLELADETGDPAKLREISEKLKEATERAKAQNNFETIVKLMELLLRLAKKAGDPALLREISEQLKEAVKKAEEQNNFEVIAKLMELLLRLAAEAGDPQLWREIWELLLKAFEKALEQNNFEVIVKLMMLLLALARTLGDPRLLKKILELLKKATKRAEEQNNSEVLELLRHLLKTLAKTV

SEQ ID NO: 2679 - protein, 197 aa, synthetic construct
  REGION 1..197: note = Synthetic
PEEDQTLFELHQRAIDELLKSFEKHGDKIAMLLVVQHLKTLAKIALKAGDPSKLQQIFELLKKAIERLLRSFEKHGDKLAMYLVVELLRLLAEIAKAAGDPDKLQKIFELLKEAIERLFRSFEKHGDKFAMLLVVRLLRTLAEIALTAGDPSKLEEIYQLLQAAIRRLEKKFKKHGDEHALVLVEWLKKTLKEIEQK

SEQ ID NO: 2680 - protein, 197 aa, synthetic construct
  REGION 1..197: note = Synthetic
PEDDDKTFEELQKIIKKLLTSFERHGDKDAMKIVVMLLKWLATIALRAGDPDKLQQIFELLKKAIERLLRSFDKHGDKDAMELVVQLLRTLAEIALTAGDPSKLQTIFELLKKAIESLLRSFEKHGDMDAMLLVVKLLLTLAEIAKAAGDPSKLEQIFQLLQAAIRRLEKKYEKHGDEAAAAAVSILKYTLREIEST

SEQ ID NO: 2681 - protein, 233 aa, synthetic construct
  REGION 1..233: note = Synthetic
PKEIAMKAYWLLFEAYYLLLFEDKSYREEIRRLLEKVEQMAQKVYEQAVAQGDPKAIAAAAQLLLALANLFRQFEDKEYKEKIRELLEQVRQMAEQVYRLAKAQGDPEAIALAAQLLVELAKLFRKFEDKEYKEQIRRLLEQVRQMAETVYKLAKAQGDPHAIALAAKLLVQLAKLFRKFEDQEYREQIERLLQQVAKMAAEVLRLAYEQGDPDALWAALQLLQELLKLFKQV

SEQ ID NO: 2682 - protein, 252 aa, synthetic construct
  REGION 1..252: note = Synthetic
PEELAKEAELLLKAAAWVLSVAKKSGDSRAAEIVKELLRKAQELAEEIARQAKKTGDPDALALAAKILVAVAQIVLELYRLFGDERMLERVKELLAQAEELAEHIARLAKATGDPRALALAAKILLDVAQIVLQLYELKGDERLRERVERLLKKAQKLAEEIARLAKERGDPQALALAAEILLKVAKIVLQLVQAFGDSRMKARVEELLEQARRLAEEIERLAREKGDPRAQTLAEEIKLEVKLIEILIKAQ

SEQ ID NO: 2683 - protein, 252 aa, synthetic construct
  REGION 1..252: note = Synthetic
PYEAAAYAFALVEIAQEVLEEYKKKGDERKREKVEELLKQAQELAEEIARQAKKKGDPQALALAAKILVAVAQIVLQLYDQFGDSRMRERVEELLKQAEELADKIAELAKKAGDPDALALAAKILVAVAKIVLQLYKRFGDSRLAERVKKLLRKAQELAEEIARLAKETGDPRALALAAEILLEVARLVLELYKTYGDERLREQVERLLEQARRLAEEIERLARETGDPHALTLAKKIKAAVTFIELLLKET

SEQ ID NO: 2684 - protein, 221 aa, synthetic construct
  REGION 1..221: note = Synthetic
PTQALTKALKTLLKATKFRELGDEERVRELLKKVEKMAQAVFEQAEAQGDPKALAAAAQLILKLAELFQALGDEEQVRRLLEQVERMAQKVFELAKRQGDPEALAAAAELILQLAELFQRLGDEEKVRQLLEQVERMAQEVFRLAKAQGDPEALALAAELILALAELFQRLGDEERVKELLKQVEKMAAQVQKLANKQGDPKAALLAFKLLEKLTKLKQRL

SEQ ID NO: 2685 - protein, 221 aa, synthetic construct
  REGION 1..221: note = Synthetic
PDSLAATAQAVLLRAEKFEREGDEERVRELLKKVEKMAQAVFEQAERQGDPQALANAAELILKLAELFARLGDEEQVRRLLEQVERMAQKVFELAKKQGDPWALALAAELILKLAELFLELGDEEKVRELLEQVERMAQEVFRLAKKQGDPYALALAAELILKLAKLFLALGDEERVRQLLKQVEKMAKTVTELAKKQGDPKALKMASQLRTKLAALKQLT

SEQ ID NO: 2686 - protein, 223 aa, synthetic construct
  REGION 1..223: note = Synthetic
SEEILKLLVKAHLAILHAHQATDERTAAEALRQVERLLKKAEELAAETGDPSLLLRVLLNLAFLFISIAANATDERMATEALRQVERLLKKAEEIAAESGDPQELIEVLLTLAELFIKIAESATDERMAAEAFRQVERLLKKAEELAKESGDPKQLLKVLLTLAQLFIAIAKTATDEAKAREAKKQVKRLLRKALELAKESGDPNDLWHVLTRLQKLFEQLEK

SEQ ID NO: 2687 - protein, 249 aa, synthetic construct
  REGION 1..249: note = Synthetic
PESLAATALAIILRALSALSKYAKTGDERLREKVQRLLEEAARLAKKVSEQAKQTGDPRMLLTAAKVLILVAEIALKLYQLTGDSRLREFVLELLKIAKALAEAVSELAKQTGDPRLLAAAAKLFIEVAKIALELYKRTGDERLREFVQELLKIAKELAEEVSERAKQTGDPRLLAEAAKLLIAVAQIALELYKRVGDSRLKELVEELLKEAQELANAVLEAAAQTGDPRALDDAFRVQKAVEKIEKQL

SEQ ID NO: 2688 - protein, 249 aa, synthetic construct
  REGION 1..249: note = Synthetic
PESLAATALAIILKALVALSKYAKTGDSRLREEVQRLLEQAKRLAEKVSEQAKQTGDPRMLATAAWVLILVAEIALELYKKTGDSRLRELVQELLKEAKKLAEDVSEAAKQTGDPRLLATAAKLFIEVAKIALELYKRTGDERLREFVQELLKEAKKLAEEVSERAKQTGDPRLLATAAKLLIEVAKIALELLKRTGDSRLKELVEELLKTAQELANEVLKAAAQTGDPRAIEEAFKVQKEVNKIEAEL

SEQ ID NO: 2689 - protein, 249 aa, synthetic construct
  REGION 1..249: note = Synthetic
PESLAATALAILLKALVALLKYKKTGDERLREAVQRLLEQAKRLAKKVSEQAKQTGDPRMLATAAYVLIQVAEIALTLYAKTGDSRLRKLVDELLKIAKALAEDVSELAKQTGDPRLLATAAKLLIAVARIALKLYQRVGDERLRELVQELLKTAKKLAEEVSEQAKQTGDPRMLAEAAKVLIAVAQIALELLKRTGDSRLKELVEELLKTAFELALRVIEAAAQTGDPRALTEAQKVVKEVEKIEKQL

SEQ ID NO: 2690 - protein, 207 aa, synthetic construct
  REGION 1..207: note = Synthetic
PEELALYAKLLVALAQIALNLYERLGDERAREFVEELLKEAERLAEKVAEAGNPEALWQAAEVLVALAQLALQLYRLTGDERYREWVARLIEKAERLAEKVSEAGNPEALLQAADILLKLAQLALQLYATTGDERYREQVERLIEKAERLAQKVAAAGNPKALAAAAFVLFRIAQLAAQLARRTGDSRYVEIMKELFKQADALIKKV

SEQ ID NO: 2691 - protein, 207 aa, synthetic construct
  REGION 1..207: note = Synthetic
PKELALKAWAAVSEAQFALVAAAVTGDSRYREQFEELLKKAERLAQAVASAGNPQALYAAAEVLVRLAQLALQAYKQTGDERYVEWVAKLIEQAERLAEKVAEAGNPEALFQAAELLIKIAQLALQAYEETGDSRYAEQVARLLEKAERLAQKVAAAGNPEALKQAAEVLQKLAELALQLAERTGDKRYFEWFKELLKQATALLKKV

SEQ ID NO: 2692 - protein, 207 aa, synthetic construct
  REGION 1..207: note = Synthetic
PKELLIEASYAVAVAQLALVLASVTGDSRYREQVNELIKHAERLAQEVAKAGNPQALYAAALVLIKIAQLALQLYKQTGDERYREIVARLIEQAERLAEKVSSAGNPEALWQAAEILLKLAQLALQLYKETGDERYREQVERLIEKAERLAQKVAAAGNPAALKQAAEVLHKLAELALQVAEATGDSRYFEIFKELLKQALKLQKRV

SEQ ID NO: 2693 - protein, 268 aa, synthetic construct
  REGION 1..268: note = Synthetic
SEFEEMLFKTNLKLVELLLEEIKRLAEAAGHPEAKELVEQTEKLARKAAETYRTMSEEQSRRAAKLLRFLFTFLQVIRLILEISKKAEEAGHPEAKKLLEKTLEQAKKALQTFETMSEEKSDRAQEQLEWLYTFLQVIRLILEISELAEEAGHPEALRLLEKTLEEAKKAFETFEKMSEEKSKRAQETLEFLYTFLEVIRLILEISQLAEEAGHPEAKEELERTLKAAKTAFEVFRTMSEEQKAAAQHLLESLLFLLELLREKLEKSK

SEQ ID NO: 2694 - protein, 224 aa, synthetic construct
  REGION 1..224: note = Synthetic
SEELDSMFKELLRLINAILRLAKENGQESMAELALRLLEQLLKTYAAGDSRTLERLLKIARATLLIIQIFKLAKENGQSKMEELAKQLLKALKEVEEKGDMETLKRLIMIAEATLLIIKILKLAEENGQERMKELAEELLEALQAVYEKGDMETLKRLIAIAAATLHIIAILKLAKENGQEEMVEKAKELLATLREVKDKGDSETLKKLYLEAHATYVKLLAKK

SEQ ID NO: 2695 - protein, 226 aa, synthetic construct
  REGION 1..226: note = Synthetic
TEEDLKKLWKALASVHEALKLLAALGDSEIMQRLVELALKLFEAYAQGNKEQVEKLIEILEALVKVAKALVLLAQLGDSDIMEALKRIAAALEEYYAQGNEEQVKLLIRILDALVKVAEALKLLAQLGDSSIMKTLKELLKRLIEYAKQGNSEQVEKLIRILEALVAVAQALVALAQLGDSEIMEKLKRILARLFEYYKQGNDEQVSRLIATLLKLVLTANLKRLK

SEQ ID NO: 2696 - protein, 224 aa, synthetic construct
  REGION 1..224: note = Synthetic
STEVKLLILFAKMALSQIKRLAKEAGDEQLEELVRRIESLLREAEARNDKELARMVALIAFAVAYAAAVLKIAQEAGDEELKKLVQKILESLREALQRNDSELAQFVWLIAQAVWYAAQVLKIAQELGDEQLKELVRRILTLLKEALARNDKDLAYMVWLIAQAVWYAAQLLKIAQELGDETLLKAVQLILELLAEALQRNDSKLAEWVWELALAVWELALSEK

SEQ ID NO: 2697 - protein, 223 aa, synthetic construct
  REGION 1..223: note = Synthetic
SEEILKLLVKAHEAILHAHLATDERTATEALRQVFRLLKKAEELAKESGDPQELLKVLLNLAFLFISIAANATDERMAEEALRQVFRLLKAAEKLAKKSGDPQQLLEVLLTLAELFILIAESATDERMAAEALRQVERLLRKAEELAAESGDPKQLIKVLLTLAELFIKIAKSATDEAMAREAKKQVKRLLKKAWELAKESGDPNELHKVLTRLQKLFTALNK

SEQ ID NO: 2698 - protein, 224 aa, synthetic construct
  REGION 1..224: note = Synthetic
STELKLLILLAKMALWNIKQLAKEAGDEQLEELVRRIEKSLREAEARNDEELARMVALIAFAVAYAAAILKIAQEAGDSELEKLVQKILASLREALQRNDKELAWMVWLIAQAVWYAAQVLKIAQELGDEQLKELVRRILTSLDEALARNDKKTAEMVWLIAQAVWYAARLLAIAQRLGDETLKEAVKVILELLREALQRNDSSLAQHVWELAVALYEFALSQE

SEQ ID NO: 2699 - protein, 224 aa, synthetic construct
  REGION 1..224: note = Synthetic
SERLYTLINEALEAAVRIAEAAKEAGDEQLLELVRRILKSLKDAYKRNDEELAKMVWLIAQAVYYAALVLKIAQEAGDSELKKLVQRILESLREALARNDKETAYVVWLIAQAVWYAAAVLKIAQEAGDEQLKELVERILKSLQEALQRNDKDLAYMVWLIAHAVWAAARVLKAAQEAGDKDLKEQFQRILEKLLEALQRNDKDRALELAAEASFVLLEAALSR

SEQ ID NO: 2700 - protein, 255 aa, synthetic construct
  REGION 1..255: note = Synthetic
KEEKFYYFKVLVEVALDLLKEALRVAGQPDAARMLEILEELLERAERLRKAGNDEKVEKILRVLAFAVKVAKAIASLAAALKTLGQPWAAAMIKILLELLRRAVELQEQGNDEEVEKILRLLDFAYKVAQAIASLAQALRELGQPDAQAMIAILLELLRKAVELQEQGNDEKVEKILRVLAFAYEVADAIAKLAEALHRAGQPKAREMIKELYELLRRAVELQDQGNDEAVETILAKLFAAALKAEAFYMKAYMK

SEQ ID NO: 2701 - protein, 248 aa, synthetic construct
  REGION 1..248: note = Synthetic
SESEILALLEKALEVFALMAEGDKEKARKELKKILEEARRLIEEALREFAEKGDPTALWVAILALMILANLLQLLFTAGDREQAKRTLKRLLELLRRLIKEALRYFAEKGDPTALELAIKALKILAHLVRLLLEAGDHEQAKRTLQELLELIRRLIEQALREFQEKGDPTALQLAIKALKILAELVALLQEAGDKEQAKRTLKKLQELAEKLIREAFREAKETGDPTAVELAVQAVSILLQLMLLEIK

SEQ ID NO: 2702 - protein, 235 aa, synthetic construct
  REGION 1..235: note = Synthetic
SESKASEALWKIAVELAKELLKASSPQQFFEIIERYLKELSRELKEAGVSEQLIAEALAWLAYFAFLFYVFAELKKASSPEEIFKIISEFLRRLSEVLKRAGVSEELITKALARLALFLASLSLLQALKNASSPEQIFAIISRFLELLSRVLKEAGVSEQLIVEALAKLALSAAMEALFDELANASSPEQIFTIITKFARALAEVLRQAGVSESLIEEALKRLRDAAFHQVLVHT

SEQ ID NO: 2703 - protein, 238 aa, synthetic construct
  REGION 1..238: note = Synthetic
SEEFAYLVAKALRYVTELFKAAGGDPRKAYEMLLRAIKWLKARADELGLSEEAKKKLNFMVIAQFAQLLVKALFEQAGGDPRKATEMLKRAIEIVERLAKELGLSEEQLKELNFRIIETFAKDLVRRLFEQAGGDPRKATEALKTAIEIVERLAKELGLSEEQLEELNKQIFRTFAEELVKELFKQAGGDPRKANEMLKKAIAIVIKLASELGLSEEQLAELIWAVVQTFLEELERQL

SEQ ID NO: 2704 - protein, 238 aa, synthetic construct
  REGION 1..238: note = Synthetic
SETLTANALTWFTKIALAKARAAASDPRKFKELLKKILKVAKELLEKLGMSEEEALKLLTAILLEVFLEFAIEYAQKAASDPRKFKEFLKKVLKTAKEIAEEAGMSEEKMAELLTRILLAVFTRLALQKAKEAASDPRKFKEFLKKVLRTAKEIAEEAGMSEEQMTELLTQILLSVLQELAVEKLKEAASDPRQFKRILEEVLETAKEIAEEAGMSEEAMKLLLTLIALAVELYATLK

SEQ ID NO: 2705 - protein, 238 aa, synthetic construct
  REGION 1..238: note = Synthetic
SEMMTANALKDFTAIAIRLAREAASDPRQFKRLLKKILKYAKKVAEALGMSEEEMAKLLTAILLAVLLELAIERAQKAASDPRKFKEILAKVLKTAKEIAEEAGMSEQLMTELLTRILLAVFTRLALQKAQEAASDPRQFKAFLAKLLKTAKEIAEEAGMSEEALQKLLTQILLSVLLKLALEKLKEAASDPRQFKRILEEVLELAKQIAEEAGMSEEALKVLLTLIALAVEIYRHLT

SEQ ID NO: 2706 - protein, 238 aa, synthetic construct
  REGION 1..238: note = Synthetic
SETMTSNALTHFTKIALELARKAASDPRQFKRLLKKILKFAKAVAEKLGMSEEELLKLLTAILLRVLLELAIKKAQEAASDPRKFKKFLLKVLKTAKEIAEEAGMSEEAMTELLTRILLAVFTRLALQKAQEAASDPRKFKEFLTKLLRTAKEIAEAAGMSEEAIQELLTQILLAVLQKLALERLKKAASDPRQFKRILEEVLEIAKQIAEEAGMSEEALKTLLTLIALAVEIHAHLE

SEQ ID NO: 2707 - protein, 238 aa, synthetic construct
  REGION 1..238: note = Synthetic
TEELTKRLLTNLTLLAKILAKIAASDPRLFAKILAAILRAAKEEAERAGMSEEQILALLTAILLAVFLEIALERLQSAASDPRKFKEILKKILKTAKEIAEEAGMSEQQMKELLTAILLAVLLRLALQKAQEAASDPSQFKAFLKKLLKTAKEIAEEAGMSEQQMRELLTYILMAVLHYLALERALKAESDPSQFKRALEEVLEIAKQIAEAAGMSEELMETLLKSIATLVELYAKAK

SEQ ID NO: 2708 - protein, 223 aa, synthetic construct
  REGION 1..223: note = Synthetic
SSNIKTALTLAKKAIEIAAKATDSSAAAEALRLVEKLLRHAEKSAAKEGDPQQLLRVLLTLADLWIKIAKSATDERMAKEALRQVERLLKKAEELAAESGDPEQLLKVLLTLAELFIKIAASATDERKAKEALAQVERLLRKAEELAEESGDPEQLLTVLLTLAELFIKIAKNATDEAKAREANKQVKRLLEKAEKLARKSGDPSQLWYVKTVLTMLKMKLKN

SEQ ID NO: 2709 - protein, 238 aa, synthetic construct
  REGION 1..238: note = Synthetic
SEDLAELLYEFFAHNLREAAQRYADDPSQLTEKILKLLLAVKKVAKAAGLSEELIQRLLARLLSEAMAQILLQIAQRYADDPSQLEERILELLKLVREIAKKAGLSEELIERLLAELLSKAMTLILLQIAKRYADDPSALAKEILKLLRLVKRIAKKAGLSESTIQKLLAALLFRAMLAILIEIAQRYADDPSRFKESIEKLLQLVEEIAKKAGLSEQAIRELLTALKLLAEFHQEVK

SEQ ID NO: 2710 - protein, 238 aa, synthetic construct
  REGION 1..238: note = Synthetic
SSILYEFLFRLFAHNLKEAAQRYADDPDALSRTIYRLLLLVKSLFKKAGLSEELVQRFLARLLSEAMTQILLQIAQRYADDPSKLETRILQLLKLVREIAKKAGLSEELIQRLLAELLLKAMLLILLQIAKRYADDPSALLKSILELLRLFKRIAKKAGLSEQLIAELLAALLLQAMYAILAEIAQRYADDPSRLARSIEELLKLVEEIAKKAGLSEEAIRELLTALALAAAFHLELQ

SEQ ID NO: 2711 - protein, 238 aa, synthetic construct
  REGION 1..238: note = Synthetic
SEEKAETLFLKMAKKLHEIAHRYADDPSQLAKSILELLKRFKKEAEEAGLSEELIERLLLRLLSEAMTHILLEIAARYADDPSQLETRILELLKLVREILKKAGLSEEAIERLLLELLSKAMTWILLTIAERYADDPSALTESILKLLRLVKRILKKAGLSELAIAKLLLDLLYKAMLLILLQIAERYADDPSRLAKSLEELLQLVEEIAKKAGLSELAIELLLTKLKQTAEFAIKVK

SEQ ID NO: 2712 - protein, 238 aa, synthetic construct
  REGION 1..238: note = Synthetic
SEEKAETLYERLVAKLLKAVVKHADDPRKLSESILELLKRVKQEAKEAGLSEELIERLLARLLSTAMTSILLAIAQTYADDPSKLEKRILELLKLVREIAKKAGLSEKTIAKLLAELLSAAMTLILLQIAQRYADDPSQLSESILKLLRLFKKIAKKAGLSETQIQTLLARLLSKAMALILKQIAQRYADDPDRLKESIEKLLQLVEEIAKKAGLSEELIKILLTALASQAELALKTQ

SEQ ID NO: 2713 - protein, 251 aa, synthetic construct
  REGION 1..251: note = Synthetic
SEEAKKLLEELTAALLELFQALNEFTDPRFLKIVFFALELAFKALKMIEQGDLEQAEALVRALQLVLKLLRALEELRRKLEEFTDPQFQEIVKLAIRLAEKAIEMIEAGDSKQAEELTRALELVLQLLRAIEELKKKLEEFTDPQFQRIVKQAIRLAQAAIEMIEQGDLEQAEELTEALRFLLALLRAIENLRKLLEEFTDPEFQRAVKKAIELAEKALQMIREGDLDKAKELFKKLLEVFLELLKRAQKK

SEQ ID NO: 2714 - protein, 251 aa, synthetic construct
  REGION 1..251: note = Synthetic
SEEAEKLKKELTEALAELWTALLEFTDPEFQKVVKFLLKLAYTAMEMIKKGDLEQAEKLTRALQLVLKLLRALEELRRKLEEFTDPQFQEIVKLAIRLAKKAIEMIEKGDLEQAEALTRALELVLELLRAIEWLKKALETFTDPDFQRIVKQAIRLAQAAIEMIEKGDLEQAEKLTEDFKFVYFLLSALIYLKQLLKEFTDPEFQKAVKKAIELAEKAIEMKRKGDDEKAEELFKKLLDILLELLKRLDAK

SEQ ID NO: 2715 - protein, 251 aa, synthetic construct
  REGION 1..251: note = Synthetic
TEYAEAALFALKAAIKHLEKRLKEFTDPRFQEIVKLAIDLAKKAIEMIKQGDLDTARKLIAALVRVLKLLEAIEELRRKLEEFTDPQFQEIVKLAIRLAEKAIEMIAAGDSRAAEELLRALELVLKLLRAIEELKRKLKEFTDPAFQRVVKFAIDLAQKAIEMIEKGDLRQAEELTRALELVLKLLRAIEELRRLLEEFTDPEFQKAVKHALKVAYLAIAAIAHGDLTLAELLIKHLEAVLRELRKRLKEK

SEQ ID NO: 2716 - protein, 249 aa, synthetic construct
  REGION 1..249: note = Synthetic
TKERLKELALQIKAALRQAKELLKKVGDEAVEKVVRLLEELLRQVKEAEARGNLEEAIKIAELALLLVQILNALEEAKKTLEQTGDEEVKKVVELLRELLEKVIAYTKNGNIEEAIKIARLALLLVAILKALKAAKETLKDVGDEEVEKVVRLLRELLEKVIEYTKRGNLEEAYKIALLALLLVQILEALLKAKETLKRTGDEKTEEVVRELRKLLEAVIEYTERGNLEEAYAIALYLLMLVATLRAQR

SEQ ID NO: 2717 - protein, 249 aa, synthetic construct
  REGION 1..249: note = Synthetic
KEEKLKRLATFIKHALKQAQAALRYTGDEDVEKVVRLLEALLRRVEEYEKRGNLEEAIKIAELALLLVRILNALRAAKETLKKKGDEETKKVVELLRQLLEKVIEYTERGNLEEAIKIARLAWLLVKILKALEKAKETLKKVGDEEVEKVVRLLRELLEKVIEATQRGNIEEAIKIAELALLLVAILEMLLKAKETLKRAGDEEAEEVVRDLRDLLEKVIEYTERGNLEAALTLAEILLEMVELLLLSK

SEQ ID NO: 2718 - protein, 249 aa, synthetic construct
  REGION 1..249: note = Synthetic
TEEKLKFLKTLIHNALREAQQTLKETGDKEVEKVVRLLEELLRQVEEYEKRGNLEEAIKIAELALLLAKILDALRFAKELLKKYGDEDTKKVVELLRKLLEKVIEYTERGNLEEAIKIARLALLLFKILLALLKAKKTLKEVGDKEVEKVVRLLKELLEKVIEYTERGNLEKAATIAHLALLLVAILEMLQAAKETLKRTGDKEVEEVVRELRKLLAAVIEYTERGNIEHAVSIARKALDLVEKLEASK

SEQ ID NO: 2719 - protein, 223 aa, synthetic construct
  REGION 1..223: note = Synthetic
EEEIKKTLKAAQRALLKAITATDEREKAEALRQVERLLRKAEELAKESGDPQQLLRVLLTLADLFLQLAVLATDERMAKEALRQVERLLKKAEELAAKSGDPQQLLEVLLTLAQLWIKIARLATDERMAQEALRQVERLLRKAEELAEESGDPQQLLEVLLTLAELFIQIAKLATDEAMAREAKRQVKRLLKKAEELARKSGDPRQVDEVTHRLADLFIKLKL

SEQ ID NO: 2720 - protein, 253 aa, synthetic construct
  REGION 1..253: note = Synthetic
TETDLEELKQTIYLLLKLVETQWKRHPEDPILEQILRLMAELLRQVEEQERQGNLEKAKRIAELAVLLAQILKYLKSVKEAWERHPEDPTLEQILRTMEELIKKVLEQLRQGNYEKAKAIALLAQLLAQIVEYLRKVKEAWKRHPEDPTLEEILRTMEELIRQFLEQVRQGNFEKAWAIAKLAILLAQIVEYLKKVKEQYARHPEDPALERILRTMEALIREVLEQIRQGNYEKAVKIALTAIAAAQSLLEEE

SEQ ID NO: 2721 - protein, 253 aa, synthetic construct
  REGION 1..253: note = Synthetic
PSHVLTAIDEALKKAAETFWHALYQGDSRSAKAAFKFIKKLFEEVARLLEKARRLGDPKLFLLAIEILLYAAQQLFQILAIEGDKERLEEMFRRIEELFKQVKKLLEEAKRLGDPKLVLTAIEILLKAATALFKNLAEQGDSERLEEMFRRIEELFEQVEELLEEAKRLGDPELVLKAIEILLKAATSLFEILREQGDEERLRKMFEFIKRLFEEVLELLEKAERLGDPRLVKTAWRIAFEAKVALTLLATLS

SEQ ID NO: 2722 - protein, 253 aa, synthetic construct
  REGION 1..253: note = Synthetic
PESELHFIKLALFSLTKQFQTLRAQGDQSRLEEILRRIFELFEKVARLFEKALRDGDPQLVLLAIEILLAAAASLFQLLRQQGDSSKLEEMFRRIEELFEQVARLLEEAQRLGDPKLVLLAIEILLYAATILFQLLRQQGDQERLEEMFRRIQELFEQVLELLEEAKRLGDPELVLKAIEILLKAATSLFEILRQQGDSERLRKMFEEIERLAEQVLALSQEALELGDPKLLETAIRILKKAETSLFKLQVAE

SEQ ID NO: 2723 - protein, 253 aa, synthetic construct
  REGION 1..253: note = Synthetic
PEETLKFIAAQLRLAAILFQLSRELGDSSQLEEAFRRIKELFEKVKRLLEKAFRLGDPWLVLLAIEILLEAATWLFQALRQQGDEERLEEMFRRIAELFEQVLRLLAEAEALGDPKLVLKAIEILLKAATSLFQLLRQKGDSEKLEEMFRRIEELFEKVLELLEEAERLGDPELVLKAIEILLAAATALFQLLRQQGDEERLRAMAKFIWKLAHKVFEEAEKAEKLGDPRLFFTAVKILEKAATSLTKISKQV

SEQ ID NO: 2724 - protein, 221 aa, synthetic construct
  REGION 1..221: note = Synthetic
PEREVATASKSAQLALEAARRSGDPRALKAVETAIKELQELLKEAQAQGDPQKVVEILSIIAQLLLQMYAETGDPKYLEQVERIIRQLRELLKEAQAQGDPRKVIEIASIIAQLLLQMYAQTGDPKYLERVEEIIRLLQAELREAFAQGDPQKAVEILSTIAQLLLQMYDQTGDPKYLEQVKKIIEALERLLAEAEKQGDPNAWAQIYYAIVVLQKQQEKK

SEQ ID NO: 2725 - protein, 197 aa, synthetic construct
  REGION 1..197: note = Synthetic
SEEILELLKQLVELNERALKEGDKDTKRRIELFQKLVETIKELKKTAEEEGDEEVKQLAEQLREALQRAVEKGDEETLKRIATFAELVKMITDLKRTAREEGDEDVKQLAEQLRELLQEAWEKGDESTLYRISVLAKLVATITRLLQTAREEGDEEVLRKAKKLRELLQEAREQGDEDQLHKIYSFALKVTLETEAK

SEQ ID NO: 2726 - protein, 235 aa, synthetic construct
  REGION 1..235: note = Synthetic
SEAEHQAETLARIAAKYVLEKIKQATDERQIEKLLTKLLKFIKELAARAGVPEEDIVRLMAELAARVIFEFILEQIKQATDEAQIERLLEKLLRTIERLARKAGVPEEEIARLMAELAARVIFHFILEQIKQATDEAQIQRLLEKLLKTIEKLARAAGVPEEEIVKLMAQLAAEVIAHFIMEQLAQATDEREREELLRKLLETIEKLARQAGVPEEYIRTLASSHAFLVEALART

SEQ ID NO: 2727 - protein, 235 aa, synthetic construct
  REGION 1..235: note = Synthetic
TEALAKALLAALKYASEILEKIKQATDERQIEELLERLLRRIKELAARAGVPEEWIVRLMAEIAAAVIFKFILEQIKQATDEAQIEKLLEKLLRKIEALARKAGVPEEEIVRLMAELAARVIFEFILELIKQATDEAQIQRLLEALLRKIEKLARQAGVPEEEIVQLMAELAARVIFHFILEQIKQATDEREADELFLKLFKTIATLAAQAGVPEEKVNELALELAKQVWEAVQT

SEQ ID NO: 2728 - protein, 235 aa, synthetic construct
  REGION 1..235: note = Synthetic
SLTENKKLAEIVAQVVHFAKRANSPEAEELARRVKELWKKFTEMAARGDSEKAERLYQTAALILIVIQVIYFAQQANSPEAEELARQVLELFRKFLEMLERGDDEKAERLYQTAALLLIVIQVIYFAQKANSPEAKELARQVLELLKKFQEMIKRGDDEKAERLYRTAALLLIVIQVIYYAQQANSPEAEALARKVLELLEKFQEMLKRGDDEKAAKLFYKAANLLLTILLQLKE

SEQ ID NO: 2729 - protein, 267 aa, synthetic construct
  REGION 1..267: note = Synthetic
SKEEAYIELIALYVALLYSSAVKLAKELNSPEAERILKTVAELVERAKQAARRFKETGDPKALEIIEIMLILVQVLLILLEAIKLAQELNSPEAEEILRKVKELVERALQAARRFEETGDPKAKAIVEIMLIAVHVLLILLQAIKLAQELNSPEAEEILRKVKELVERAIQAARKFEETGDPKALEIIKIMLIAVQVLLILLKAIKLAQELNSPNAKTALKVVKLAVELALQAAREFEETGDPRAARTVESALRFVEAALAWLEKAK

SEQ ID NO: 2730 - protein, 221 aa, synthetic construct
  REGION 1..221: note = Synthetic
SDELAQEVLEWALKILKLAAEAGNEKAARFVHKLLDTIIRAIKQGDEEQLRFALLALQVMWWALEIQKLAEEAGNEKAKKFVKKLQETVLRAVDQGDEEQLRFALLALKVMWAALEIQKLAEELGNEKAKRFVEKLQETILRAVDQGDEEQLRWAWWALFVMAAALRIQKLAKEAGNEEAERQVKRLQETVFRAVDQGDEDQLLKALLALLRMYSQLLFQV

SEQ ID NO: 2731 - protein, 267 aa, synthetic construct
  REGION 1..267: note = Synthetic
SQEETEIELLAMLVELLYQKLVKLAKELNSPEAERILKTVKELVERAKQAARRFKETGDPKALAIIRIMLIALLVLLILLEAIKLAQELNSPEAEEILRKVKELVERALQAARRFEETGDPKAEEIIKIMLIAVQVLLILLQAIKLAQELNSPEAEEILRKVKELVERALQAARKFEETGDPKALEIIKIMLIAVQVLLILLKAIKLAEELNSPFAKTALKVVKLAVESALQAARRFEETGDPRAARHIEKALRIVQTALADLETEK

SEQ ID NO: 2732 - protein, 267 aa, synthetic construct
  REGION 1..267: note = Synthetic
SLEALKIHVIAARVQAILAKATKLAKELNSPEAEKILRTIKELVERAKQAARRFKETGDPKAQEIIEIMLIAVQVLLILLEAIKLAQELNSPEAEEILKKVKELVERALQAARRFAETGDPKAAEEIEIMLIAVQVLLILLQAIKLAQELNSPEAEAILRKVKELVERALQAARKFLETGDPRAKETVEIMLIAVQVLLILLKAIKLAQELNSPEAEKNLKEVKKAVEKALQAARKFLETGDPRALEFVKLALEVVKVHLKVLKLLK

SEQ ID NO: 2733 - protein, 256 aa, synthetic construct
  REGION 1..256: note = Synthetic
SEVDKAVLKALLSAAKVIVKKIEEKVRKTGDEEIKEKAERLLEALEKAIREFEKTGDPKAAALAELMFLAIQALLIVVAITEKVRKTGDEEILQKAREWLQKLEEAIQAFRETGDPKAKALAELFFLAIQALLLVVLITEKVRKTGDEEILEQARRLLEKLEQAIRAFEKTGDPKAKALAELMFLAIQALLLVVQITEKVRKTGDEEALKTARELLKALQKAIETFEKTGDPKAKEAAERAFKAIASQLELLKAAE

SEQ ID NO: 2734 - protein, 256 aa, synthetic construct
  REGION 1..256: note = Synthetic
TEVDKAVLKALLSYAKKLVKSIEEKVRKTGDEEIKEKAERALEQLEKAIREFEKTGDPKAAALAELMFLFIQALLLVLQITELVRKTGDEEVLQKARELLQKLEEAIQAFRETGDPKAKALAELLFLAIQALLLVLKITAKVRKTGDEEILEQARRLLKKLEEAIREFEKTGDPKAKALAELMFLAIQALLLVVQITEKVRKTGDSEALKTARELLKALQKAIETFEKTGDPKAKEAAERAFKAIELQLKLLKHAE

SEQ ID NO: 2735 - protein, 224 aa, synthetic construct
  REGION 1..224: note = Synthetic
SKEIEALATKALKNLLEALKIAKEAGDEELIKYLEELLKRLEELTAQGDYEQLKILVLAAEAIANLAEAKKIAQEAGDEELLRTLDKLLRKFKKLTAQGDYEQLEILVLAAKAIANLAKALKIAQEAGDEEVERLLKKFLRKFEELTDQGDYEQLKILVHAATAIMFLAWAFKVAQEAGDEDLLRELEELLKQLEELTDQGDEEALHKLVNRLIAIAIKALLKK

SEQ ID NO: 2736 - protein, 224 aa, synthetic construct
  REGION 1..224: note = Synthetic
SKELESLATKALKNLVTALKIAKEAGDEELIKTLEELFKRLEELLRQGDYEQLKILVLAAEAIANLAKATKIAQEAGDEELLRFLKKLLRKFRKLTQKGDYEQLEILVLAAKAIANLAAALKIAQEAGDETVKRLLTELLRKFEELTDRGDYEQLKILVHAAEAIRFLAYAVKVAQEAGDESLLRELQELLRQLLELTDQGDEDALHKLVFKAILVAAKAIFSK

SEQ ID NO: 2737 - protein, 224 aa, synthetic construct
  REGION 1..224: note = Synthetic
SKEIYALALKALNNLLTALAIAFEAGDEELLKTLEELVKRFEELTKQGDYEKLKILVLAAEAIANLAKALKIAQEAGDEELLRWLRKLLKKLKKLTAQGDYEQLEIAVLAAEAIANLAAALKIAQEAGDEQVKRLLKKLLKKLEELTDQGDYEQLAILVLAAQAIRNLAWALKVAQEAGDEEVKKALAELLRQLEELTAQGDEEQLEKLVFKANLIAIKALLSK

SEQ ID NO: 2738 - protein, 224 aa, synthetic construct
  REGION 1..224: note = Synthetic
STEVLELAFKAFVNLSKALKIAAEAGDEELRRTLEELFRRLKELVNQGDYEQLKILVLAAEAIAALAEAVKIAQEAGDEELLRFLTKLLRKFLELLRRGDYEQLEILVLAAKAIANLAKAKKIAQEAGDEQVKRTLTALLRKLEELTDKGDYKQLKILVLAAYAIMNLAQALKIAQEAGDEDVKKELKELLRELEERTAQGDEEALLRLVLKAHEIAQKARERK

SEQ ID NO: 2739 - protein, 224 aa, synthetic construct
  REGION 1..224: note = Synthetic
SESIEQAAFHAKRALVYAMAIAEAAGDEELRRTLEELFRRLEELVQKGDKEQLDILVMAAEAIANLAQALLIAQEAGDEELLRWLTKLLRKLAELLRQGDYKKLMILVSAAAAIANLAAALKIAQEAGDEDVKRTLKKLLRKLEELTDQGDLKQLNILVLAAEAIMYLAEAVKIAQEAGDEDLLRELAELFRQFEELTDQGDEDALLALVYKAIAIALKAKKRK

SEQ ID NO: 2740 - protein, 224 aa, synthetic construct
  REGION 1..224: note = Synthetic
SEEIEKLAKYAKFLLTLALEMAKQAGDEELRRTLEELLRRLEELTQQGDYEQLKILVLAAYAIALLASALLIAQKAGDEELLRFLKKLLRKLVELTRKGDYEQLEILVLAAEAIANLAEALKIAQEAGDEELLRLLKKLLKKFEELTDKGDYEQLKILVLAAEALAALAEALKIAQEAGDETVLRLLKELLKKFEELTDQGDYEALADLVKKAKFLAHVAKSLK

SEQ ID NO: 2741 - protein, 221 aa, synthetic construct
  REGION 1..221: note = Synthetic
SSDEAVEILTWLYKIEELAREAGNEKALRFVEELFRTVFRAAKAGDEEQLRQALLALQVMWLALEIQKLAEEAGNEKAKRFVEKIQETVFRAVKQGDSEQLRFLKLALAVMKAALEIQKLAEELGNEKAKRFVEKIQETVLRAFDQGDESQLHKAHNLLLVMRFALEIQKLAEEAGNEEALRQVAALQETVLRAAEQGDEKQLLDALLKLLDMYFKLLRQV

SEQ ID NO: 2742 - protein, 204 aa, synthetic construct
  REGION 1..204: note = Synthetic
TEESFRVAEAAAQILKLARALGQEEFVELAKKMLEEAKSGDSSEIQKVYRILQVALLALRILELARKLGQEEFFEFAKEMFKKVNSGDDSEIEKVYLILLVALIALQILEKARRLGQEEFHKFAQEMFKKVLSGDDSEIKKVYAILLVALAALKILELAEKLGQEEFFETAERMFEEVLSGDERAIQEAANKLAKALATLTAQA

SEQ ID NO: 2743 - protein, 224 aa, synthetic construct
  REGION 1..224: note = Synthetic
SVEIALAALYALDNLAKAYEIALELGDEELLKTLKELMKRLAELVKKGDEKQLKILVLAAEAILNLAKAIKIAQEAGDEELLRTLKKLLRKFRKLTAQGDEKQLKILVSAAHAIALLAHALKIAQEAGDEDVKRILTKLLRKLEELTDQGDEKRLAILQIAAAAIAALAEAFKIAKELGDESLLRELKELLRQLEELTDAGDVIKLLDLVFKAYDIALKAKTKK

SEQ ID NO: 2744 - protein, 224 aa, synthetic construct
  REGION 1..224: note = Synthetic
SESIEALATEAKAYLEAAAKAAKHAGDEELLRTLEELFRRLEELTQQGDYEQLKILVLAAKAIANLAYALQVAQKAGDEEVKRLLTKLKRKFRELTQKGDYEQLEILVLAAEAIANLAAALAIAQEAGDEELKRFVKALLRKLEELVEKGDYDALRILVLAAEAILNLAKAVKIAQEAGDEDLLRELAELFRQFEELTDAGDETSLKALVIRAEAILKQAELSK

SEQ ID NO: 2745 - protein, 247 aa, synthetic construct
  REGION 1..247: note = Synthetic
SAEEYKFLKLMQELEKTAKELEKSSDPQFQQVAELAKDLVRKAWKALKEGDEDALRKLQELLEFVQLMAELLKTAAELEKSSDPRFQDVARLAKALVKAALRALREGDEDKLRKLYEKLFFVQIMAELLFTAAELEKSSDPTFKQVAELAKKLVEAALRALKEGDEDKLRTLFFKLLFVQHMAELLKTAAKLKQSSDPRFKEVAKKIEKLVKEALRALREGDMDKLKAILEALSKVQVDAELLLKDK

SEQ ID NO: 2746 - protein, 244 aa, synthetic construct
  REGION 1..244: note = Synthetic
SEATALNLRLAATLLKTLAEEMERAGSPQYRKIAEYLRQIVEKIEEAIRQGDEEQLAHVALLAKLVLLAVELLKAAEYMEKLGSPWARKIAEFLRQIVKKILEAIREGDKSKLAFVAHLAELVLLAIELLASADNMERAGSPEYRKIAEFLKRIVEKILEAIREGDLKKLSHLALLAELVKLATELLKKAEEMEKAGSPEYRTIAKRLRDLVEEILEAIREGDETQLLRLAQKAKELDFETTLT

SEQ ID NO: 2747 - protein, 244 aa, synthetic construct
  REGION 1..244: note = Synthetic
SKLLALKLKYLAKLLKANAEEMERAGSPEYRKIAEFLRQIVEKIEEAIRQGDEEQLRHVYLLARLVQLAVHLLKLAEAMENAGSPQYRKIAEFLRQIVKKILEAIRAGDKEALEFVALLAKLVLLAVRLLALAENMERAGSPEYRKIAEFLKRIVKKILEAIREGDLEQLVHVALLAELVKLAVELLRKAEEMEKAGSPEYRAIAKRLRKIVEEILQAIREGDESQLLKLAQKAKEVDWQTLLT

SEQ ID NO: 2748 - protein, 255 aa, synthetic construct
  REGION 1..255: note = Synthetic
SEELFRAQKIVSKIQELVYKLAKEGADAEHAKELIKIVEDIQRKIEEAAKNGDSETLRKLYEIARAIYLVARIAELVLRLRKQGADAEFAKKLEEIVQEIIRAIIEATRNGDLDTLKALYEIASAIYIVARIIELVLRLREKGADTEFAEKLAEIVQKIIEKIIRAIKNGDRETLKALYKIAYAIYLVARLADLVLKLREEGADTEEAERLQREVQEIIEKIIKAERNGDLEQLARLAWEALLILTQAKLAEKRI

SEQ ID NO: 2749 - protein, 220 aa, synthetic construct
  REGION 1..220: note = Synthetic
DEREIVKLLHTLLRRIASAIKAGDTEKMEKLLKFLAAAKKVEEAIKKAQKLSELGDPRARRIVELLKELVQRIVEAIKAGDEEQMERLLEFLEAALQLLHAIQKAAELAKLGDPLARKIVELLKELVARIVEAIEAGDREQMERLLQFLQAALLLLDAIAKAKELASLGDPRARKIVEKLKDLVEKIVQAIKAGDYEQMKRLLMELKLALSQLTLIELEK

SEQ ID NO: 2750 - protein, 206 aa, synthetic construct
  REGION 1..206: note = Synthetic
TEERLTHTALELIFRALRAKKEGDERKKEEIRKLLETLALMKELLEILRWAEQRYKETGDPKAKRLAERVKELIERLYKALKEGDERALERIKRAVETLKLMFELLLILAEAERRYKKTGDPKAKKLAEQVAELFEQLYRALAEGDERKLEKIKWAVEVLLAMAYALKQLETAQREYAKTGDPRAEATARESERLIEKARETLEKG

SEQ ID NO: 2751 - protein, 252 aa, synthetic construct
  REGION 1..252: note = Synthetic
TREKVELLLRLVRFMLEWLKKLIEETGDPWLERIYKSIEKILKRAEEYMKQGDLEQALRILKVALLILKVVNALYALKKRLEETGDPFTERIFESIREILERAIEYMKQGDLEQAERILEVALLILQVFLLLQALAERLKETGDPYLREIFEAIRELLERAIEYMKQGDLEQAKRILAVALLILKVTFLLQALKERLKEVGDPFLKRFFEEIRKMLEEAIEAMKQGDLETALRALKFALKLLKFTFKAQKTQ

SEQ ID NO: 2752 - protein, 252 aa, synthetic construct
  REGION 1..252: note = Synthetic
SREKVQELHEQVWRLLEKLKKRAEETGDPETERIAKAIAKILLRANAYAQQGDLEQAQRILKVALLILKVTFLLQALKERLKQTGDPETERIFESIREILERAIEYMKQGDLEQAARILEVALLILQVTFLLQALAERLKETGDPFLREIFESIREILERAIEYMKQGDLEQAKRILAVALLILKVTFMLQKLKERLKETGDPETERIFEKIRRALEEAIEYMKQGDLEKALEILKKALNALVLWFLKQLAK

SEQ ID NO: 2753 - protein, 221 aa, synthetic construct
  REGION 1..221: note = Synthetic
SSEEAKAVLDWLFAIEELAKEAGNEKALKFVAELFRTVFRAAAQGDSEQLRQALLALQVMWWALEIQKLAEEAGNEKAKRFVEKIQETVLRAQKQGDEEQLRFAKLALKVMWLALEIQKLAEEAGNEKAKRFVEKLQETILRAWDQGDEEQLHKALNALTVMYAALLIQKLAKEAGNEEAERQVRALQETVLRAVEQGDESQLLKALLKLIFMAYELKRQK

SEQ ID NO: 2754 - protein, 252 aa, synthetic construct
  REGION 1..252: note = Synthetic
TELQVLQLLLKVKLALMKLESRLKKTGDPYTERIFKAIAEILKRAEEYVKQGDLEQALRILRVALLILKVTELLQQLAERLKETGDPELKRIFEAIREILERAIEYMKQGDLETAHAILLVALLILQVTFLLQALKERLKETGDPYLREIFEAIREILERAIEYMKQGDLETAATILHVALLILKVTFLLQALKERLKETGDPDTERIYEDIRRKLEEAIEAMKQGDLEKALDILLAALATLTTYFKAEEEK

SEQ ID NO: 2755 - protein, 252 aa, synthetic construct
  REGION 1..252: note = Synthetic
KEEKVAVLLALVKAALEVLALLLEKTGDPFTKRIFKAIEEILKRAEEYVKQGDLEQALRILKVALLILKVTFALLSLAEALKKTGDPWLERIYETIREILERAIEAMKQGDLEQAKRLLEVALLILQVTHLLLALKERLKKTGDPFLREIFEAIREILERAIEYMKQGDLEQAKRILRVALLILKVTFLLQQLKERLKETGDPFTATMFERIRTALEEAIEAMKQGDLEKAYAALLYALLALEYTQKEQKSK

SEQ ID NO: 2756 - protein, 252 aa, synthetic construct
  REGION 1..252: note = Synthetic
KEEKVAVLLALVKAALELLKKVLEETGDPFTERIFKAIEEAYKRALEYLKKGDLEQALRILEVALLILKVTFALLSLAERIKKTGDPELERIFEAIRELLERAIEYMKQGDLEQAKRILEVALLILQVTHLLQALKERLKETGDPFLREIFETIREILERAIEYMKQGDLEQAKRILRVALLILKVTFLLQQLKERLKETGDPFTEELFEKIRRALEEAIEAMKQGDLEKAYAALLYALILLKFTQQRQKSK

SEQ ID NO: 2757 - protein, 258 aa, synthetic construct
  REGION 1..258: note = Synthetic
SYEDLKLLWEAFALAEKAKQIVEEIKKKATDESLIELAKELLKIIVELALALKDMSKEQLETAFLLLLLVLLALEAVAIVLRIAKHATDSKLIENAKELLEYIIKLLRKLRNMSTEQLKTKFQLLELVLLALRAVEIVLRIAEKATDEDLIENAKELLEIIIELLRKAKDMSKEQLELLKLMLELVLQALQAVEIVLKILQNATDESLIERAKRLLEKIIKLLREALNMSEEQLKKLAAKLLAVLIELWAVLLELEKR

SEQ ID NO: 2758 - protein, 258 aa, synthetic construct
  REGION 1..258: note = Synthetic
SEELKRLMKEAHEAALKAIEIVKRIAEKATDEELIELAKELAKLIIELAQEAQNMSKEQLEHLFLMLEAVLLALEAVEIVLRIRQHATDEELIELAKELLERIIQLLREARNMSKEQLEKLFLMLQAVLLALRAVAIVLRIREKATDEELIELAKELLETIIELLRELRNMSEEQLELLFAMLQLVLQALRAVEIVLKIRKKATDEELIERAKRLLKKIIELLREALNMSKEQLKKLFKELEAVLFELAAVAIHAYAK

SEQ ID NO: 2759 - protein, 259 aa, synthetic construct
  REGION 1..259: note = Synthetic
SERLKAIMKELATLFQKIFEILTELWKRGADLELIAALLRTIKELWKRAKEAAAMGDERQLKLVLIMARLIYLVAQILKILTELAEEGADEETIEQLRRLIKELFEQAKRAFEEGDEKQLKLVEIMARLIYLVAQVLKILAELQKQGADEETIEKLQRTIAELLRRAKEAFEKGDERKLKLVEIMAKLIYQVAAVLKTLAELKKAGADEEQIKRLAAKIKELFDKAKEAFEAGDESKLDEVAEELSKIALTALDLALKR

SEQ ID NO: 2760 - protein, 259 aa, synthetic construct
  REGION 1..259: note = Synthetic
SESLETAMWFFKFWVTSVEILLKILAKLGADEETIEQLQRTIEELKKRAEEAFKMGDEKQLKLLVIMAKLIAAVAHVLLILHLLREQGADEETIAQLQRTIKELFEQAKRAFEMGDERQLKLVEIMARFIYLVARILLILKELEEKGADEELIEKLRRFIAELLRRAKEAFEMGDERKLKLLAIMAQLIYLVAQVLKILQELREAGADEEVIKTLAELIRQLWRAAVEAFKKGDETLLERVEELARQIYEAAVLMKELR

SEQ ID NO: 2761 - protein, 259 aa, synthetic construct
  REGION 1..259: note = Synthetic
SEKLRVAMLNLDLLFETIQTILEELKKAGADEETIEQLQRTIEALKRRAEEAYAMGDERQLQLVQIMAHLIETVARVLKILHELLEKGADEETIKQLRRTIKELFEQAKRAFEAGDEHQLRLVEIMARLIYLVAQVLKILAELKDAGADEEFIEKLQRFLNELLKRAREAFKAGDERKLKLVEIMAKLIYLVAQVLKILQELRKAGADEEKIEKLAETIRQLFDAAVSAFKSGDEDLLKTVLSAAKLIYKTAKALKEKR

SEQ ID NO: 2762 - protein, 259 aa, synthetic construct
  REGION 1..259: note = Synthetic
SERILKALKELYELAKRVHELLKELKKDGADEETIAQLEKFITKLMEAAVKAAKKGDEKQLKLVLTMARLIYLVLQVLKILKELEEEGADEETIEALQRTIKELWEQAVRAFEAGDERQLKLVEIMARLIYLVAEVLKILAELEKAGADEETIEKLKKLIKELFKRAKEAYEAGDEKKLKLVEAMALLIALVAHILKVLQELKEQGADEEEIERLAQTIRELLEEAKEAFEMGDEKKLVELLLKAFLIALEAQAAANKR

SEQ ID NO: 2763 - protein, 259 aa, synthetic construct
  REGION 1..259: note = Synthetic
SERILKALKELYELALRVHEILEELAKQGADEETIKQLKKTITELMEAAVKAAKMGDEHQLKLVLIMARLILLVAQVLKILKELLEEGADEETIAELRRLIKELWEQAKRAFEAGDERQLKLVEIMARLIYLVAQVLKILKELAKEGADEETIEKLKRTIAELLRRAKEAFEAGDERKLKLVETMAFLILLVAHVLKILKELEKQGADEEEIERLAQTIRELLDEAKEAFEMGDESKLTAVLLKALLIALTAQAAANKR

SEQ ID NO: 2764 - protein, 221 aa, synthetic construct
  REGION 1..221: note = Synthetic
SEDAAKNVQEWLEAIERLAREAGNEKAKRFVEELKKTVKRAKKQGDEEQLFKAYLALAVMWWALEIQRLAEEAGNEKAKRFIKKLQETVFRALKQGDDEQFAKAKLALEVMWWALEIQKLAEEAGNEKAKRFVEKLQETVLRAWEQGDEEQLAWALLALKVMWWALEIQKLAEEAGNEKALKAVKSLQETILRALEQGDKLQFEFALNLLKQLYEQLLREK

SEQ ID NO: 2765 - protein, 259 aa, synthetic construct
  REGION 1..259: note = Synthetic
SERILAAMKEFTELAEAVKRILEELAKEGADEETIEQLKKTITELSEAAVKAAKAGDERRLKLVLIMARLILLVAQVLKLLAELEKEGADEELIEALKRTIKELWEQAKRAFEAGDERQLKLVEIMARLIYLVLQILKILKELAKAGADESTIEKLRRLIKELFKRAKEAYEAGDERKLKLVEAMALLILLVAKILKILQELKEAGADEEQIKRLAQTIAELLDEAKEAFEMGDESKLVDVLLKAFLIANEAEVAASKK

SEQ ID NO: 2766 - protein, 259 aa, synthetic construct
  REGION 1..259: note = Synthetic
DERILAAMKELNELFERIEKLLEELDKKGADEETIEQLKRTITELVEAAVKAAAAGDEKRLKLVLIMARLILLVLQILKILAELQEKGADEELIEQLQRTIKKLFEQAKRAFEAGDERQLKLVEIMARLIKTVAKILKILAELQDKGADESTIEKLQRLIKELFRTALEAFEEGDERKLKLVEIMAYIIALVATVLKILQELLEAGADEEDIERLLQTIAELLREAKEAFEAGDEKKLVKVALKASLIAFTAKAMKKRR

SEQ ID NO: 2767 - protein, 259 aa, synthetic construct
  REGION 1..259: note = Synthetic
DERILAAMNELRELFTRIKKILEELKKAGADEETIAALERTIVELMKAAVKAAAAGDEKALKLVLIMARLILLVAQVLKILKELQEQGADEELIEQLQRTIKKLFEQAKRAFEAGDERQLKLVEIMARFIYLVAKILKILKELQDQGADEETIEKLQRLIKELFRRAKEAFEAGDERKLKLVLIMAQFIALVAEILKILAELKKQGADEEQIERLAQTIRELLDEAKEAFEEGDEKKLTKVLLKAHLIAFTATAMAEKR

SEQ ID NO: 2768 - protein, 259 aa, synthetic construct
  REGION 1..259: note = Synthetic
DERILKATSELDELYKKVEKILEELKKEGADEETIEQLKKTITELVEAAVKAAKAGDERALKLVLIMARLILLVLLVLKILKELEKEGADEEFIAQLKRTIKELWEQAKRAFDAGDERQLKLVEIMARLIYKVAQVLKTLKELEKKGADEETIEKLRRTIAELFRRAKEAFEAGDERKLKLVATMAQLILLVATILKILQELKEAGADEEAIERLAQTIRELLDEAKEAFEEGDEKKLTKVALKANLIAMTAKAMKSKR

SEQ ID NO: 2769 - protein, 216 aa, synthetic construct
  REGION 1..216: note = Synthetic
SSELYERLKELYKEAARLKKEGDKEKAEKIKRQLELIHTALQALYTLAVALANGEVSEQLWETVRQLVEELLRLLAEGDLEKAEALTRQIRLIMAAVKALRLLYQALQNGEVSEQLYETVRKLVEELLRLLREGDEEKAEKLTYQIKLIAQAVKALVLLHQALANGEVSEEDYEKVRQLVEELLRLLREGDADQAAVATHKIAAIAYKVAVRAVAY

SEQ ID NO: 2770 - protein, 216 aa, synthetic construct
  REGION 1..216: note = Synthetic
SSELYKFMEKLIKQYARLLKEGDEEKAKEAQRYMELIQTAIEALLTLTKAVKNGEVSEQLYETVRKLVEELLRLLKEGDLEKAEKRTEQIRLILTAVKALRLLYQALANGEVSEQLYETVRQLVEELLRLLREGDDEAAKKITEQIRLIMTAVKALRLLYQALANGEVSEEDYEKVRQLVEELLRLLREGDLKKARVATWKIQVIANKVALLLAEA

SEQ ID NO: 2771 - protein, 251 aa, synthetic construct
  REGION 1..251: note = Synthetic
STDEKLLEEFIRQALATLEEVYKQIGSPVIEKLLREAQELARALEEAKKRGDMEKAWKIAYLVLLLAVIAKALQTLFQVYKEIGSPVIKKLLEQAKELAEKLIEALRRGDDEKATAIAKKVELLLNIAKALQTLFQVYKETGSPVIAKLLEQAKELAERLLQALRRGDMEKAEEINRQVLLLLTIAKALQTLFQVYKETGSPEIKKLLEKALAHAEALIKALRRGDEFFATFLAKNVKDLKRKAEAKKRKH

SEQ ID NO: 2772 - protein, 223 aa, synthetic construct
  REGION 1..223: note = Synthetic
SEEEAATELIKIYIAVAKAHLEGDERKFEELKQAAEEIKKLLEAIKTAKKVAKTSDDPLAKTAMEELLEIIKAVLQAKKEGDEEKFEKLLRLAEQITELIKAIITATKVARTSDDPVAEDAMRVLLDIIRKVLQALKEGDSRKFEELLKQARAITHLIKAIITATEVRRKSDDPQAERAVKKLLAIIKKVLQARKEGDSEKFTKLALKATEALAEILHIALKT

SEQ ID NO: 2773 - protein, 223 aa, synthetic construct
  REGION 1..223: note = Synthetic
TEEDAARELIKIEIKVSKAELEGDEKKYEELKQQAEEIKELIEAIKTAKKVAKTSDDPVAKTAVEELLDIIKKVLQAYREGDSSKFKELLRQAKQITELIKAIITATKVARTSDDPVAEEAVRQLLAIIKKVLQARKEGDSRKFEELLKQAREITWLIKAIITATKVARTSDDPQAERAMRKLLAIIAKVLEARAEGDEDKFKELAKKASEALLEILLILLET

SEQ ID NO: 2774 - protein, 196 aa, synthetic construct
  REGION 1..196: note = Synthetic
SERLKELNLELWELLIKIAKRGVGLELVEQLLKKANEAVKRGDEQTLRLVILVARLLLKAHEIKAQGVGVELVEELMKQAEEALQRGDEQTLRLVALVADLLKLALEIKAKGVGVEDVEELMRQAEEALKRGDEKTLKLVLAVAKLLRLAKEIKDQGVGVEKVEELMNAAREALKRGDLDTLLDVLWKAYALLYTR

SEQ ID NO: 2775 - protein, 228 aa, synthetic construct
  REGION 1..228: note = Synthetic
SEEFKELQQRLHKILEKAFEIAKEGDPIAEQLFKLVAAVTKMLKKGDYEKAEKIIRFAELLIKLWEIKQRAKEIEEQGDPIAEDLKRLVEAVQRMLERGDYEKAEKIIKFAELLIKLWEIKQRAKEIEERGDPIAEKLKELVRQVAEMLKRGDYEKAVTIITFAWNFLLLVEIKETAKKIEEQGDPTAERLKELVEQVERMLDRGDLEEANLIIIEAALEILKWLKKE

SEQ ID NO: 2776 - protein, 196 aa, synthetic construct
  REGION 1..196: note = Synthetic
SERLATLLLELAQLAFEIEAAGVGVELVEQLLKKAFEALKRGDEKTLRLVITVARLLKLALEIKAQGVGVELVEELMKAAQEALERGDEDTLRLLDIVAKLLLNAASILRAGVGQEDVEELMRAAEEALKRGDEQTLRLVALVAQLLQMLYLIKKFGVGEEKVEELMNQAREAFKRGDEKTLKEVLEKAKALFLTL

SEQ ID NO: 2777 - protein, 206 aa, synthetic construct
  REGION 1..206: note = Synthetic
SEEETMKILTAELILTIAKLILKELEEKGDPQLEKLVRKIKKLLEQVQRILEEYAGKDERALDMALAVAAALLVVAKALKLLLELKDKGDPRLKKLVQKIFELLEQVLETLEEYAGKDEFKLTMAYHVAVALLMVAKALKLLLKLLDSGDPELKREVAKIFEALQRVLEILEEYAGKDASKLAEASKEALRLLHEAARLLKEAEAK

SEQ ID NO: 2778 - protein, 206 aa, synthetic construct
  REGION 1..206: note = Synthetic
SEEMKFKVTLAEWHVKTAQKILSKLEKKGDPQLEKLVRIIEKLLKQVQRTLEAYAGKDEKKLETAILVASALLIVAKALLLLAELKDKGDPQLKELVQKIFELLEQVLETLARYAGKDERALKMAWYVAFALLIVAKALKLLAKLRDAGDPELKTAVQIIFEALKRVLEILEKYAGKDEKALTEAITEALQLLANAKALKALADEK

SEQ ID NO: 2779 - protein, 284 aa, synthetic construct
  REGION 1..284: note = Synthetic
SEDEKKKVYDLALKALKLSLALLEAAKKNGDPRLYKELARIAKFANKLVEEARRLVKSENEEDLERAVRILEVALLLLEAMFLIITLKKEAEANGDPRLYKELYEIARFAAELVQRALELVASENSEDLAEAKRILEVAILALRAMQLIIELKKAADANGDPRLAAELKEIATEALKLVKKALELIASENEEDQAEAKRILEVALLALEAMKLILRLQKAADANGDPRLKEELQKIAEAALRTVKRALELVKSENSADLKEAYERLLEALLALLQMLAKILAEK

SEQ ID NO: 2780 - protein, 284 aa, synthetic construct
  REGION 1..284: note = Synthetic
SFEKYWTLLSLALKAFALILALLLAAKKNGDPRLAKELKRIAKAAAKLVEEALRLVKSENEEDLERAQRILQVALLALEAMFLIIKLKKEAERNGDPSLFKELYEIARKALELVQRALELVQSENSEDLEEAQRILKVAILALRAMQLIIELKKTAEKEGDPRLVKELKEIADEALKLVKKALKLVESENEQDLKEAYAILLVALHALHAMKLIFALQKYAKEIGDPRLKEKLERIAEEATRLVKRALKLVHSENEEDLLEALLRLAEAQMKLMRVLAEIHAQQ

SEQ ID NO: 2781 - protein, 258 aa, synthetic construct
  REGION 1..258: note = Synthetic
SEKENEAVELVFRALHAMFKLVRQAAKEGDEFKMKLVEQALRVVRRIMKLIAAGVDVEKAKLLAAVILLVLEAIQIMAELKRQAEEKGDERKKRLVETAERIVKRILELIEAGVDIEKAVLLARAILAVLRAIQLMQELDEKAKKEGDERLKEFVRRAEALVKKILELIERGVDIEKAWLLALAIQAVLTAIDAMKELKRRAEKKGDESKLRKVEEAERRVAKILELILRGVDVEKALDAAFKILLELLQTMLEEFKK

SEQ ID NO: 2782 - protein, 230 aa, synthetic construct
  REGION 1..230: note = Synthetic
ELEKLSLMLLEFLYEIFARLLKATDESEQTLLKELAETIVTIIALAEEIYRLAARAGDEELLRLAKELIEYVQEILQRVKEATDESEMRKLLETALTIAKIIYLAAQIYALALKAGDEELLKLAEQLIEFVQEVLQRVKEATDEKQRRKLLELALTIAKIIYLAVWIYVVAKEAGDEELLRKAKKLLEKVFRILEQVKKATDEQRMRELLASAYLEALKIAAEAQKEATK

SEQ ID NO: 2783 - protein, 260 aa, synthetic construct
  REGION 1..260: note = Synthetic
SSAFLKLLIEHIKKIVEKILKLAKEMGDPDLLRIAKELKKYLEEIAQKVDESTDEEQILKELSLALQIALIIATAARILKLARELGDPELLRIAKALIKTLKEIMKRVKDSTDEKEIQFQLYLAALIARIIYIAARILKLAAELGDPELLRIAKALIEEVKEIMKQINESTDKDKITRQLELALTIAKIIAIAARLLKLAAELGDPRLKEAAKFLIKWIKKIMKEVKESTDELKITLALYNAKLLAETAERWAKEEAKKK

SEQ ID NO: 2784 - protein, 263 aa, synthetic construct
  REGION 1..263: note = Synthetic
SDEEQERILQILEAMKRLFKKLAELRKQGVDPKDIERIKEILEKVLELVAQAQKSTDKDKAERLLRIADIYLKLADLYFLLAQLKLQGVDPKDIARIEEIMARVEELVEQARKSTDKKKAEKLLAIARILLELAYLYFLLAQLKLQGVDPRDIARIEEIMKRVEELVKKARKSTDDEQAALLLKIARLLLELAKVYFDLAQLKLQGVDPRDIARIEEIMRRVEKLIKAALDSTDKEAAKRLLTKAANLLAEAMFTYLKALLDK

SEQ ID NO: 2785 - protein, 223 aa, synthetic construct
  REGION 1..223: note = Synthetic
DEEKLTEMNKTVHTASEAAKEAGDQDLAKRLLDLAKKFLKALEAGDEDKLRALEDLFRMILLVILAIWYAREAGDEELAKRLKELLKKFEEARRAGDEDKLRKLKKLFEMILIVLVAIWYAREAGDESLAKRLKELLEKFERALKAGDEEKLRRLEALFKFILAVVVAIRTAKDAGDEDLARKLKELLQKFTEALKKGDESKLKKLTLAFIAILLTISVKAAE

SEQ ID NO: 2786 - protein, 228 aa, synthetic construct
  REGION 1..228: note = Synthetic
SEEFKELQDRLLKIYAKALEILKEGDPIAKVLLKLVAAVTKMLKAGDYEKAEKIIRFAELFIKLWEIKKRAKEIEEQGDPIAEKLKKLVEQVQRMLERGDYEKAEKIIRFAELLIKLWEIKQRAKEIEEQGDPIAEDLKELVRQVEEMLDRGDWEKAKEIIAFAWHLLLLWEIKQTAKKIEEQGDPTAERLKELVEQVERMLKRGDFEEANLVLLEAALKIAEWLEKE

SEQ ID NO: 2787 - protein, 223 aa, synthetic construct
  REGION 1..223: note = Synthetic
TDEELEELAKAVHELTKTAKEAGDSELAKKLLELAKKFLEAIAAGDEQKLRELKELFRMIATVLKVIWYAREAGDSELARRLKELLQKFEEARKKGDEQKLRELEKLFEMILIVVKAIWYAREAGDEELARRLKELLEKFTRAQKAGDEEKLRQLEELFKMILAVVVAIRAAREAGDEHLAKKLQELLQKFEEARKKGDSEKLEKLKFKFLEILLTVSAKAAI

SEQ ID NO: 2788 - protein, 264 aa, synthetic construct
  REGION 1..264: note = Synthetic
TKELIEKLKEYMYKLFHLLAELLLRIFKYGDPKAKEIAKLALTALKALKRALETGDESKLKTALLIAQLVEYIFRLWLQLLELKERVEKYGDPRAREILKLADRAMKALSRAIKAGDEDKLRLALLIAQVVEEIFKLWLQLLELKERLEKYGDPKAKEILELAEKAMEALSKAIKAGDEDKLKLALLIARVVNAIHNLWAVLRMLKEAVEKYGDPKAKEILEKAKKAMKKLSEAIKKGDEDELKEALKKAIKVLLAFLEWLARK

SEQ ID NO: 2789 - protein, 264 aa, synthetic construct
  REGION 1..264: note = Synthetic
TELELFKLQQYALKLYEELLELKAAVEKYGDPKAKEILELAKRAMEALKRALETGDERKLTLALLIAQVVEYIFRLWQQLQELKERIEKYGDPRAREILKLAERAMEALSRAIKAGDEDKLKAALLIAAVVEYIFELWLQLLELKERVEKYGDPKAKEILELAQEAMEKLSKVIKEGDIKKLLLALQIAQVVKYIFRLWQELQELKERLEKYGDPKAKEILEKAEKAMKKLSEVIKKGDESELSKAQFKAVEVEVEFKAWAREQ

SEQ ID NO: 2790 - protein, 232 aa, synthetic construct
  REGION 1..232: note = Synthetic
SEKEEEAKRLAELLKLIAKSAKKNGMEEVYRIAVEIAEKLEQAVREGDSSKLEKLILYARAIALAYLLFLLAEKARRNGMEDVYRVAKEIAEKLVKAVEEGDEDKLKKLILQAKLIALAFKLAEIAERAKRNGMEEVYRVAKEIVKKLVQAVQEGDQDKLKELLLYARAIFYAFELSELAERARANGMSSVFETAKEIVRRLVAAIEEGDTDKLKELIEKAEIIKTFFEQVK

SEQ ID NO: 2791 - protein, 203 aa, synthetic construct
  REGION 1..203: note = Synthetic
TELEMTAAQILAELLKLLATEAEKKYKETGDPTYEKISRVAKEIVRRIESAKERGDEDSLRRLHEMARAVLLAFRLAKTAEEAEKKYKETGDPTYEKISRVAKKIVERILEAVARGDESAIRALTRMAEAVLLAFRLAQLAEKAEQAYKETGDPKYQWLSELAKKIVKKILEAVARGDESAIKALQHVAHNVLEYFERAEKVK

SEQ ID NO: 2792 - protein, 203 aa, synthetic construct
  REGION 1..203: note = Synthetic
KEEELLTALHLALKLLELAKEAEKKYKETGDPTYEKISRLAKEIVKAIVKAAKAGDEDSIRALAEMAEAVLLAFRLLELAEEADQKYKETGDPTYEEISKLAKAIVKRILEAVERGDEDQIRKLTLMAKAVLHAFSLAKIAEAADQKYKETGDPRWQEISERAKRIVKAILEAVKRGDEQKIKELLFAAILVQLDFELQETAR

SEQ ID NO: 2793 - protein, 203 aa, synthetic construct
  REGION 1..203: note = Synthetic
SETEKEKAKDLAKKLKETAVRALLAAQRTGDPTYEKIFRVALTIVERIESALKRGDEDSIRRLLEMAKAVLLAFALANTAEAAEQKYKETGDPTYEKISKVAKKIVQRILEAVERGDESQIRRLLRMAEAVLLAYLLALIAESAETAYKETGDPRYQEISERAKRIVEAILEAVKRGDEQQIKELTEEAEKVLQEFLDQEKAR

SEQ ID NO: 2794 - protein, 203 aa, synthetic construct
  REGION 1..203: note = Synthetic
SEFEVALALDAALKLQETAEEAKKKYKETGDPTYEKISRLAQEISERILKAADSGDERSLRALALMAIAVLLAFKLLQLAEAAEQKYKETGDPTYEKISKVAKEIVKRILEAVERGDEEAIATLALMAIAVLMAFKLALLAEAAEQKYRETGDPRYAEISERAKRIVEKILEAVKRGDKKQILRLLVEAFKVLSTFKQQEEAR

SEQ ID NO: 2795 - protein, 203 aa, synthetic construct
  REGION 1..203: note = Synthetic
SEFELALALWAALKLQELAEEAKKKYKETGDPTYEKISRLAQEIANRILEAAKKGDERSLRALATMAFAVLLAFKLLQLAEAADQKYKETGDPTYEKISRVAKAIVRRILEAVERGDEDQIATLALMAIAVLMAFKLAEIAEAAEQKYKETGDPRYQEISERAKRIVHKILEAVARGDKKKILRLLVAAFEVYSQFKKIEEAR

SEQ ID NO: 2796 - protein, 203 aa, synthetic construct
  REGION 1..203: note = Synthetic
SEFETIVALQAALALLEIAKEATKKYKETGDPTYAAISRLAREIFERILKAAEKGDERSLRALLTMAFAVLHAFKLLQIAEAAEQKYKETGDPTYEKISKVAKEIVKRILEAVERGDESQIATLALMAAAVANAFRLAELAEAAEQKYKETGDPRYQEISERAKRIVEKILEAVKKGDTDQIYRLFVEALKVQLDFDAIEEAR

SEQ ID NO: 2797 - protein, 228 aa, synthetic construct
  REGION 1..228: note = Synthetic
SEEFEELSKAATRIKYQAEAIESQGDPSAADLKRLVEKVERMLKRGDYEKAEEVIRFAELLLKAYWIAMAATEIEKQGDPIADELKKLVEQVKRMLKRGDYEKAEKIIRFAELLIKLWEIKQKAKEIEERGDPIAEKLKELVRQVEEMLKRGDYEKAEKIIRFAELLIKLWEIKQKAKEIEEQGDPTAEFLKTLVERVERALDAGDYEAAAAAIQAAESAITAHRVKR

SEQ ID NO: 2798 - protein, 203 aa, synthetic construct
  REGION 1..203: note = Synthetic
SSLEIMQALYAALKLNELAAEADKKYEETGDPTYEKISKVAREISKRIQKAAESGDERSLRALALMAFAVLLAFELLEIAEKAEQKYKETGDPTYEEISKLAKKIVARILEAVERGDESKIAALAVMAIAVALAFRLAELAEKAEQAYKETGDPRYQEISERAKRIVKKILEAVKRGDEDQIFRLFVEALKVLTEFQEQEEAR

SEQ ID NO: 2799 - protein, 203 aa, synthetic construct
  REGION 1..203: note = Synthetic
SELEKAKASYAASKLLETAEEAKKKYKETGDPAYAKISRLATEIFKRILEALEKGDERSIRALALMAWAVLLAFELLELAEAADQKYKETGDPTYEEISKLAKKIVERILEAVERGDESQIATLALMAVAVLQAFELALLAEAAEQAYKETGDPRYQEISERAKRIVKAILEAVKAGDREQILRLSVAALKVLYEFRKQEEAR

SEQ ID NO: 2800 - protein, 204 aa, synthetic construct
  REGION 1..204: note = Synthetic
PEQETINKVFNTILKRMESAERRGDEDELERLAAMFQAVLLAQKLLETAKRAEEKYKETGDPTYEKISQLAKKIVEAILQAVKRGDEEQIRRLQTMAEAVLLAFRLAETAEAAEQKYKETGDPTYEKISQVAKKIVEAILEAVARGDESQIKKLADAARAVLLAFELALQAERAEEEYKRTGDPTAAKESELARQMVKSILTKI

SEQ ID NO: 2801 - protein, 232 aa, synthetic construct
  REGION 1..232: note = Synthetic
SQEQISEIVRRALEEADRALKTGDSRKLERITILLRIALAAQAVNEAALKAEKELKRTGDPSAAQIKRIVEKAIQKAYEAVEAGDLEKLKRLLILLQIAYLAMQVLEAQKRAEAELKRTGDPSAKQIVRIVKKAIEAAYQAVETGDEEQLKRLLILLKLAVLAVQVLAAQKRAEEFLKRTGDPTAEKILKLVKEAIQAAFEAVETGDENALKYVLFLLKLALLAMSNLEAKE

SEQ ID NO: 2802 - protein, 232 aa, synthetic construct
  REGION 1..232: note = Synthetic
SQEQILKISTKAFKAAWRAFQTGDERKLERVKILLKIAKLAQAVLEAQKRAEEYLKKTGDPSAKQIARIVKKAIQKAYEAVETGDDEKLKAILILLQIAYLAVQVLEAQKKAEEELKKTGDPSAKQIVRIVQKAIEEAFQAVEKGDEEQLKRILILLKIAYLAVQVLDAQKRAEEFLRATGDPTAEWIAKVVKTAIQQAFEAVETGDEEQLKWILEVLHLVYYAMASLQSKQ

SEQ ID NO: 2803 - protein, 258 aa, synthetic construct
  REGION 1..258: note = Synthetic
SEEETEFTLALTYVQLAVQQVKKIAEETGDEQLKKIVEQLQKLLEEARRIFAAGDKEKAKELLEFLLLLATVALLIAEVSKIAKETGDEDLARLVQKVLEQLQAAFEIWKAGDKEKAKETIEELLLLARVAWLVAEVSRIAKETGDEQLKRLVKQILELLAEAFEILEAGDKEKAKELLKELLKLARVLWLLAEVSRIAKELGDEDLKRFFKLVLHLLQRAFEILKAGDKEKARKLIDELLKYAKFLYHWAKMSAKQK

SEQ ID NO: 2804 - protein, 252 aa, synthetic construct
  REGION 1..252: note = Synthetic
TEEELKKLAWAVAALYQRLLEQIKTYGDPQLRRLAELLARLLKKLDEMKKRGDLEKAKKVAELIYLLLLFAELLWYLAQLIKEYGDPQLRRLFEQLRRLWEKLEEMFKRGDLEKAKKVAELLYLFAQLAILLWKLAQLIKEYGDPQLRRLFELLERLTRKLEEMLERGDDEKAKKLAELIYLLAQFAILLWELDQLIKKIGDPKLRKLREKLERLWQELEEMLKRGDLEKAKDVALELLITLHKALATATEI

SEQ ID NO: 2805 - protein, 252 aa, synthetic construct
  REGION 1..252: note = Synthetic
TEEDLTLLDSLITMLLLILAALIETAGDPQLRRLWELLRRLQEKLEEMKKKGDNEKAKKVAELIALTALIALLLYKLAALIREYGDPQLRRLFELLRKLTEELEEMLKRGDLEKAKKVAELIYLLILLAILLWELQQLIKEYGDPQLRRLFELLERLWRKLAEMLKKGDLEKAKKLAELIYLTIQIAILLWKLRQLIKEKGDPTLRKAFKILETAFKQLEEAFKRGDLEAAKKQAAVIYFLAKLALELAKLK

SEQ ID NO: 2806 - protein, 251 aa, synthetic construct
  REGION 1..251: note = Synthetic
REEKLEHVLRLLWAIFKTVQELAEQGLREDAKKFLETAEEIFEKLKKAYEKGDESTLERLLRMAQVLLLLLKIFQTLQELEEQGLAETARKFAKEAKEIYKLVKAADEKGDESALKRALTMAQVLLLLLKIFQTLQELAEQGLAEVAEKFKKTAEEIFKRVQRAAEKGDERTLERLRTMAAVLLALLHIFQTLQELEEAGRASTAKELKRKAEEIFQKVQRAAEKGDEDTLFKLLLTAIRLAAALHAEAFR

SEQ ID NO: 2807 - protein, 251 aa, synthetic construct
  REGION 1..251: note = Synthetic
REEKLTTVAAYLAAIKETLDELEAQGLAETAKKFKKTVEEIEKRLKAAYKRGDEATLERALRMAQVLQLLLNIFETLKELEEQGLAEVARKFWKEAEEIYKKVQAAAERGDESTLARALLMAEVLLLLLKIFATVARLKEQGLAETAEKFKRTAEEIYERLARADEKGDDKTLERLLRMAQVLLLLLKIFQTAQELEEKGLASFAKEFKKKAEEIFQKVQRAAEKGDDYTLILLYLKAKHLLEKLESAETK

SEQ ID NO: 2808 - protein, 256 aa, synthetic construct
  REGION 1..256: note = Synthetic
STEEYRKAMELLHRVLQKARELLEKGVDKEDIKKILKFLEKLIKQIEKAARDGDEEKLKRIIKTVKALLLLLAVAETATELLKEGVDTEKIKAIKETLKKLMEKIRRAHEKGDEEKLERIIKTVAALLLLLRVAKTATELEKAGVDTEEIKKIQETLRRLMEAIKRAEEKGDEEKLEQIIKTVAALLLLLKVAKHAYELEKKGVDTEKIQDIKRKLRRLMEEIRRAQEKGDESRLEEIYEQIARLANELLLAALKK

SEQ ID NO: 2809 - protein, 251 aa, synthetic construct
  REGION 1..251: note = Synthetic
REEKLAKVLVALTLIKETVEELKAQGLAEVAKKFARTAEEIEKLVKAALERGDEATLERALRMAQVLQLLLNIFATAAELEEQGLAEVAKKFLKEAEEIYKLVQAAAEKGDEALLERLLRMAQVLLLLLKIFATLEKLKEQGLAETAEKFKRTAEEIFKRVQRAQEKGDEKTLERLLRMAQVFLLLLKIFQTLQALAEKGLSSKATEFKKKAEEIFQKVLRAAEKGDETTLRLAVAKAAHLLEKLESAATK

SEQ ID NO: 2810 - protein, 220 aa, synthetic construct
  REGION 1..220: note = Synthetic
PEIEHSLDALVKLVEELATAAKNGIDSSRMLKILFAVAAALEIIFNIADQLRTSDDPQIQESLRELIQLLLELLRLAKNGIDAEQMIRIIEAVVDAARAILKIAELLRKSDDPTIQEALRRLIELLLELLRLAKNGIDAEEMLNIIKAVVFAAHLILAILKYLRTSDDPEIQQKLRELIEKLLRLLEKAKNGIDAEKMIFDIFLLLFKAHLFLYKAKSKK

SEQ ID NO: 2811 - protein, 220 aa, synthetic construct
  REGION 1..220: note = Synthetic
PEQEQSSRELKELLTELMERAKNGIDSSRAHEISKAVLKAAWAIILIQHKLKRSDDPQIQEALRELIQLLLELLRLAKNGIDAEQMLRIIEAFVRAAEAILKIADYLRTSDDPQLQEALRWLIEALLELLRRAKNGIDAEEMLNIIEAFVFAAEAILAIAHYLRRSDDPEIQQKLRELIEKLKKLLELAKNGIDAERMANEIFDVVLKALEILLRAEERK

SEQ ID NO: 2812 - protein, 263 aa, synthetic construct
  REGION 1..263: note = Synthetic
EESAEWLLAVALELVKRAIAELKRFLAEATSPELKETLKQLIKILETIIERLKNATDKKELLLLAALAFALVLVAQAIAELVRYLAEATSPEARETLKELIEILREIIKRLANATDEKELDLLVKLATALVQVAKAIAELIRYLAEATSPELRETLKQLIEILREIIKRLLNATDEKELELLLALAQALVRVARAIADLVRFLAEATSPEAREQLKRLIEKLRKIIAHLKDATDELALKVSVMIAAFAVEEAKAILRAVAAEI

SEQ ID NO: 2813 - protein, 236 aa, synthetic construct
  REGION 1..236: note = Synthetic
SEKLWQTLLAILYYLLLIETFFEKIPTEKAEEVLRKAEEIKEEAERASANGDEQRVRLMLLLAQIIYLLLKIQEFYEKIPTEEAEKLLRKAEAILEKAERASANGDEKKVWLLLLLAKIIYLLLKIQEFFAKIPTEWAEELLRKAEEILEKAEKAFANGDLTAVNLYLLLAQIIYLLLKIYEIFLKIPTESAEEVWRKALEILEKAFKASANGDLERVYKMLIAAEKIYEELAAEE

SEQ ID NO: 2814 - protein, 240 aa, synthetic construct
  REGION 1..240: note = Synthetic
KEEELRYASELLEAAAELVARIAKTAEDPRLVEQAKRIAVAIAELLLKAYATGDSRLIALVFALWLLLRAIELVLRIRRTAEDPRELEKAQKIMEQIKELLEEARRTGDSRLIALVYALWLLLEAILLVLRIRRTAEDPRWLEQAQKIMEQIEELIKEARRTGDSRLIKLVTALWLLLRAIELVLRIQRTAEDPREAEEAEKIMKKIQELIKQAQETGDERLIEKVKHLAHKLFLAALKN

SEQ ID NO: 2815 - protein, 240 aa, synthetic construct
  REGION 1..240: note = Synthetic
TEEELKKAQFLLELAEELVKRIEKTAEDPRELEQAQRIAVAIAELSLKAQKTGDSRLIALVWALWLLLRAIELVLRIRRTAEDPRELEKAQKIMEAIKELIEEARRTGDSRLIALVYALWLLLEAILLVLRIRRTAEDPRWLEKAQKIMEQIEKLIEEARRTGDSRLIKLVEALWLLLRAIELVLRIQRKAEDPREAEEAEKIMKKIEELIKQAQETGDERLIKKVSLLATALQYLALAA

SEQ ID NO: 2816 - protein, 240 aa, synthetic construct
  REGION 1..240: note = Synthetic
KEFELEWAQQLLEAAEELVKRIEKTAEDPRELEQAQRIAVAIAELSLKAWKTGDSRLIALVWALWLLLRAIELVLRIRRTAEDPRELEKAQKIMEQIKELIEEARRTGDSRLIKLVYALWLLLEAILLVLRIRRTAEDPRWLKKAQKIMEQIEELIEEARRTGDERLIKLVKALWLLLRVIELVLRIQRKAEDPRELEEAEKILKKIEELIKQAQETGDERLIKKVELLATKLTLAALKN

SEQ ID NO: 2817 - protein, 237 aa, synthetic construct
  REGION 1..237: note = Synthetic
TETRLKLVAINIKLALYTITEAAKRIDPKKLEELRKLAEKAQRTVEEAERRGDETLAQLAAVLILILQAYARIWEMASRIDPEKAEELRRLAEKAIRTVEEALKRGDETLARLALVLIKIIYLYAQIWEMASRIDPEKLEDLRKKAEQAIRTVEEAQEKGDETLAQLALVLIQIIYYYAQIWEMAARIDPTFASTLREAAELALKMVKEALERGDEQTAREALEFIKSLYRQAAFAV

SEQ ID NO: 2818 - protein, 237 aa, synthetic construct
  REGION 1..237: note = Synthetic
SAERLSEVAKRILEYLTKIKRMASRIDPKKAEELRKLATKALKTVLEALKRGDETLAQLALVLIQIIYYYAQIWEMASRIDPSKAEALRRLAEKAIRTVLEAQKRGDETLARLALVLIKIIYYYAQIWEMASRIDPKKAEELRKLAEQAIRIVEEAQEKGDETKARLAQVLIEIIAAYFEIYEMAARIDPSELEELRKKAEEAIRTVLEALERGDESLAAKASLTISLILLEAYARE

SEQ ID NO: 2819 - protein, 256 aa, synthetic construct
  REGION 1..256: note = Synthetic
SEEEYRKAMELLHRVLQKALELLKKGVDTELIKKIVKLLEELIKKIKEAAKKGDEDKLRFIIKTVEALLLLLKVAETAKELLDQGVDEEKIKAIKELLKKLMEKIRRADEEGDESKLERIIKTVAALLLLLRVAKTAYELEKAGVDEEEIKKIKKTLRKLMDKIFRADEEGDEEKLEQILKTVKALLLLLKVAKHAYELEAKGVDQEKIEKILKKLRRLIEEIRKADEKGDESRLEEILEQIQDLANRLILALLKV

SEQ ID NO: 2820 - protein, 237 aa, synthetic construct
  REGION 1..237: note = Synthetic
TEWDLKTVRQRINLAAAAIKKTASRIDPSKAEELRKLAEKAQRTVEEAERRGDKTRAQLALVLIQIIFAYAKIWLMAQRIDPSKAEELRRKAEKAIRTVEEALRRGDETLARLALVLIKIIAYYAQILEMAKRIDPEKLEELRKQAEEALRIVDEALKRGDETLARLALVLIQIIYYYAQIWEMASRIDPELATTLRKHAEAALRLVKEALERGDEDLAKAALKHIKTIYELAAKLE

SEQ ID NO: 2821 - protein, 237 aa, synthetic construct
  REGION 1..237: note = Synthetic
TEHRLKTVLQRIELAAAAIRKLAERIDPSKAEELRKLAAAAERTVEEALRRGDETLAQLALVLIRIIFAYVKIWEMASRIDPEKAEELRRLAEKAIRTVEEALRRGDETLARLALVLIQIIAYYAQIWEMASRIDPEKLEELRKQAEQALRTVLEAQERGDETLAALALVLIQIIYYYAQIWLMAQRIDPELADRLRKHAEAALRTVLEAQERGDEEAARRALKHIKTIYQFAAELE

SEQ ID NO: 2822 - protein, 237 aa, synthetic construct
  REGION 1..237: note = Synthetic
TEERLKTVELLIKALLLTIKQAAKHIDPSKIEELRKLAAKAQRTVEEAKRRGDETLAQLALVLIQILHAYVVIWMLAAKIDPTKAEELRRAAEKAIRTVLEALKRGDEDLARLALVLIQIIALYAFIYLMAKRIDPKKAEELRKDAEAAIRQVEEALRRGDKTAAKLALVLIEIIYYYAQIYEMASRIDPELAEELRKLAEAAIRTVKEAQKRGDEELAKWAAILIKAVAHFAKAAE

SEQ ID NO: 2823 - protein, 263 aa, synthetic construct
  REGION 1..263: note = Synthetic
SEARDWTLDVARKKAAEAAKRAKEIAAKATSPEIREIVKKLIELIKRIVERAERATDEDEKSLMIALILAIAEAVLAALRALEILMKATSPEIQKIVRKLIEIILRILERAERATDKEQIALMIRLIKAIADAVKAALRILEILMKATSPEIKEILKKLLELIERIVERALRATDERQIELMIELIKAIAKAVKAALRALEILMKATSPAIKEKVQKLIKMILKILEEAARATDETEIKAAIEQIKMIATLVERALEALRNQM

SEQ ID NO: 2824 - protein, 243 aa, synthetic construct
  REGION 1..243: note = Synthetic
WLEMLRLIAELRTLFYEAATIVAKMGDEDKHRKIEEIARQALAEAHRASERGDETRIRMALLIVQLLWYFFKALAIVKELGDEDLYRQIEKIAEEAIRRAREALEKGDEEKIKMALAILALLWYYVSALKIVKEMGDEDLYRQIAEIAQHAIQEAREALDKGDSDKIAMAVAILALLWAFVKALKIIKEMGDEDKEREIRQQAQEAIEKAARALDEGDSKQISRAYQEVLRLALEVTAKAKKK

SEQ ID NO: 2825 - protein, 254 aa, synthetic construct
  REGION 1..254: note = Synthetic
SEEVDFARTELALEAHHALEQAKQLENGGPEFKKFAEIIKQILKELIEKAKRDTDGERVRILMLLVRLVALAAEAAQYAAKLKNGGPEFKKFAKLIIDILRELIERARRDTDGESIRIIMLAVQLVVAAARAAEYAKKLKNGGPEFKKFAELIIDLLRKIIEKAREDTDGHAIEILLALVELVVLAAEAAEIAKELKQGGPEFKEEAKRIIERLRQLIERAKDDTDGETVLKILVKVKKVVHKAKEAKEKREKK

SEQ ID NO: 2826 - protein, 254 aa, synthetic construct
  REGION 1..254: note = Synthetic
SEEVSFAATELFLEAHHALEQAKSLEQGGPEFKKFAEEIKQILKELLEKAAKDTDGERVRILMLAVRLVALAAAAAQYAKKLKQGGPEFKKFAKAIIEILRELIERARRDTDGESIRILMLAVQLIVAAAQAAEAAAELKQGGPEFKKFAAEIIEILRKLIEKAREDTDGFALEILMAQVELVVLAAEAAEAAKELKQGGPEFKEEAKRIIERLRQLIDRAKKDTDGETVLKIAVKVKKVRQEAQEAKEKRAKK

SEQ ID NO: 2827 - protein, 254 aa, synthetic construct
  REGION 1..254: note = Synthetic
SEEVERLATELRKRAWKALLKAQKLLQGGPEFKKFAEEIHQILIELLLRANKDTDGEQIRILMAAVRLVVAAAEAAEYAADLKQGGPEFKKFAELIIQILRELIERARKDTDGETIEILMEAVKLVKKAAQAAEIAATLKKGGPEFKKFAKLIIDLLRALIEKARRDTDGEQIRILAEAVKLVVAAAQAALAAANLKQGGPEFKEEAKRIIERLRQLIERAKKDTDGETIRKLAEEVAKVVKRAWAAMLKKEEK

SEQ ID NO: 2828 - protein, 254 aa, synthetic construct
  REGION 1..254: note = Synthetic
SEEREKLLEELRQRAWHAWLLAVKLKQGGPEFKKFAEEITQILLELSARATKDTDGEQIRILMLAVRLVVLAAQAAEKAADLKQGGPEFKKFAEEIIQLLKELIERARRDTDGESIRIIMTLVELVVKAAEAAEIAATLKKGGPEFKKFAKLIIDILRDLIEKARRDTDGEQIRIIATAVKLVVAAAQAALAAAELKQGGPEFKEEAKRILERLRQLIERAKKDTDGETIRKIAEEVAKVVKRAWDAMQKKHEK

SEQ ID NO: 2829 - protein, 254 aa, synthetic construct
  REGION 1..254: note = Synthetic
SETEKAAAKLFQVLLEEIEELLRRIEAMGDEEAVKKAEAALRQAKKVMERAEKEGDKRLLKRALALLSFILHFLKIKELLEKIAAMGDEEEVEEAKRSLEQALEQMQRAFEEGDERLLKRAQTILTFILLFLKIKELLEKIRQMGDEEEVKKAEESLRQAWEAMQRAFEEGDSATLERAILLLEFIALFLKILELLKQIAARGDEEKVTTAKRLVKAAFDLMQAAFEEGDEELLKWAIALLRHILDELEEERKK

SEQ ID NO: 2830 - protein, 256 aa, synthetic construct
  REGION 1..256: note = Synthetic
SAEAASKAVEALLRVFATALKLLKLGVDTEDIKKILEHLKQLWELIIEALKKGDEEKLKRIIKTIEALELLLKVAETAYELLKQGVDEEYIKAIKELLKRLMEAIRRAQEKGDEEKLEAIIATVAALLLLLRVAKTAKELLDQGVDEEEIKKILTTLRRLMELIFRAAEKGDEEKLRAILSTITALLLLLKVAKTAYELEKAGVDTEDIQAILRKLRKLMEEIRRAQEAGDSTKLALIQFEVAKLLMTLMAKKTET

SEQ ID NO: 2831 - protein, 234 aa, synthetic construct
  REGION 1..234: note = Synthetic
LEEILKALLEALDELFKRIQRADGEEAEEIKRRLEEITLLVKLASAAFEAKKMAKRADDPRLIAILKQLVEEAVRLIERSRRADGEELEEIKERLKIILLLIELALLLVKALEMAQRADDPDLIAILKALVQEALSLIQRSRRADGEELEEIKERLKLISLLIRLALLAVAALEMAKRADDPWLIQFLKELVEKAVRLIKRSRRADGEELKKIKTALKLIYLMIHLALTAIKVT

SEQ ID NO: 2832 - protein, 234 aa, synthetic construct
  REGION 1..234: note = Synthetic
LLEILHALAEEAEKLTKRSQRADGEELEKIKRRLELIELLMRLAELAAKAVEAAQRADDPNLIRILKALVEEAERLIERSRRADGEELKEILERLKLIALLIELALLAVAALEMAKRADDPDLIAILKELVEEAVELIERSRRADGEELEEIKEQLKRISQLIRLALLAVAALEMAKKADDPRLIQKLKELVKKAVKLIRRSARADGEELKKIETALKVIYSQIVVALLAVVLE

SEQ ID NO: 2833 - protein, 251 aa, synthetic construct
  REGION 1..251: note = Synthetic
SDYLKAMLIHLRVLAMKAKKAMKESTDPRLRAILAKLVERAEEAIRKLEERPTEEIAQEVRDLSKLLHLALLAAEALKYMQRSTDPRLREILKRLVELAVEAIRKLEERPTEEIRQEVEDLSELLKLALLAAQALEYMARSTDPSLREILKQLVERAVDAIQKLEERPTEEIRQEVRDLSLLLELALLAAQALEYMERSTDPTLHKVLRALVESAVLAIKALEKRPTEEARKLVKSQSEELKKALAKAQAD

SEQ ID NO: 2834 - protein, 251 aa, synthetic construct
  REGION 1..251: note = Synthetic
SFEDTVELNTLRYLAALALAAMKESTDPDLREILRKLYERAKEAIRKLEERPTEEIRQEVRDLSKLLELALLAAKALEAMRQSTDPRLREILKRLVKAAVEAIRKLEERPTEEIRAEVEILLLLLKLALLAAAALKAMEKSTDPELREILKQLVERAVRAIQKLEERPTEEAAQLVMSLSLLLKLALLAAKALELMNRSTDPSLRQKLKELVERAVRAIKKLLERPTDEIYIYVIELVYLLKSALEYAETL

SEQ ID NO: 2835 - protein, 267 aa, synthetic construct
  REGION 1..267: note = Synthetic
TNELFKKAAEIYATALRLAALASKHGNPKVAAIAREILKKLKELLKELLKAAFEGDSEYKDRIELKLRALEIMAKAAELLVLAKQHGNPQVHRIAEQILQKLRELQEELERAEKEGDKEVRDRLWFKLAALKIMAEAAKLLVLAKQHGNPEVKRIAEKILQFLRELLEELERAQSKGDKEVLKRLQFFLSALSIMAFAAKLLVLAKAKGNPQVERIAKEILEKLEQLLEELARALKEGDKDAALKLLYKLVELYAKAMEAAIALELK

SEQ ID NO: 2836 - protein, 256 aa, synthetic construct
  REGION 1..256: note = Synthetic
SLEEAFKTNLKIAEAIELLLAALDLLKKAGDPDSLRIFKETARELQELLEKYNKTGDEKIKRKLETAVRIAKAIALLARAMELLKQAGDPESVAIVRETLKELYELLQAYLKTGDERLARKLDTTVDIAQAIALLAEAMKLLKEAGDPESVRIVQETLKQLYKLLQAYRKTGDSKLATKLKTTVAIARAIAMLAKAMKALKEAGDPREVAKVRETLKQLYELLRQYQETGDERLYKKLLKKVLEAINIALKALQQR

SEQ ID NO: 2837 - protein, 256 aa, synthetic construct
  REGION 1..256: note = Synthetic
STEEALKTQTAIAEAFELLLEALELLKKAGDPDSLRIFKETARELLELSAKYQETGDSKIKRKLETTVDIAKAIALLARAMELLKQYGDPSSVAIVRETLKELYKLLQAYRKTGDERIARKLKTTVLIAEAIALLAEAMKLLKEAGDPESLAIVQETLKRLYKLLQAYRKTGDEKLARKLKTTVAIARAIAMLAKAMKMLKEAGDPREVQKVRETLKKLYELLAQYQSTGDERLYKKLLKTVLEAIQIALNLLAQR

SEQ ID NO: 2838 - protein, 241 aa, synthetic construct
  REGION 1..241: note = Synthetic
FEELLKELTEQLKQLFREAKEIAAAGDEEQFKKIIKVIKTLLKATLVLFEVAEILRETHGSELFELLAELLARLLELFEWLFRVLKAGDEDKLEKAIQTIETLMKALQVLAQVAQILKETHGSELYELLQKLADQLLELFAELFRILKAGDEEKLRKLIETIETLMTALQVVAKVAQILKETHGSEKFKELQELAERLLELFEELQRILEAGDEFAFLLALLRIWKLMSELIQVAEKAKRL

SEQ ID NO: 2839 - protein, 287 aa, synthetic construct
  REGION 1..287: note = Synthetic
REKEAEEMKKRAMKALWKAANAISELKAQGDDEWAKLLEEAAAQLKELLRKLDEVLKRGNEEQFQRLYRAIAMFVRALEAIVKAARAILELQRQGDDELAKLLWKAAVSLLELLTQLKKVLDEGNEEQFERLYRAIAMFVRALEAIVRAAKAITELDRQGDSELAKLLRTAAQSLLELLEKLKETLEAGNEEQFERLYRAIQMFVDALEAIVMAAKAITQLARQGDDTLATRLREAAKKLLKLLEALKKVLDEGNEEAFREIYKKIAEAVKTLMKIVLEAQEAALKK

SEQ ID NO: 2840 - protein, 268 aa, synthetic construct
  REGION 1..268: note = Synthetic
RESEVEKALELFWKVLLIAAELLDQAAKKGDPRLLAAALEALRTAHKLSAKILSGDESTIKQALKMLEALLLFVQVTKIAWELLKEAEDEGDPELKKQAEEALETAKQLLRLVQSGDESTIEQALQMLEALLLFVQVLKIAWELIREARRLGDPALLKEAKEALEFAKQLLREVQSGDESTIKTALLMLKALLAFVYVTKAAWELSKEAREAGDPRLLKQAEEAREQAKRLLEEVQSGDEDTIKDAYAKLLNLYLKVLLTKAEWRFRK

SEQ ID NO: 2841 - protein, 225 aa, synthetic construct
  REGION 1..225: note = Synthetic
TIEELLEKVAKESKKAAKKGDIDTFLHAVFLFLALLTVKEAAADIERLEKEARETGDERNKRIAELLKKLIQEILEAVAKGDESTIEKALRLLKALLKLAKAVEEIKRLQQEWREKGDERNRRIAELLEEVIQLIIEAVAKGDDSTLAHALRLLDALLTLAKAAADIERLKKRYKEKGDEHNRKIAEQLESVIEVIIQAVARGDEEAIKAALTLLKLLLAQAKKR

SEQ ID NO: 2842 - protein, 268 aa, synthetic construct
  REGION 1..268: note = Synthetic
SWALMLEAQETANKVLFIAKDLERKARELGDPRLLEQAEEAQRFAKELAAKVKSGDESTIEQAKQMLKALLLFVQVLAIAWELSKEAREEGDPELKRQAEEALETAKQLLRLVQSGDETTIKRALLMLKALLLFVQVTKIAWQLKKEAEKRGDPQLLKEAQEALETAKDLLRKVNSGDEKAIAFAVLMLNALLLFVQVTKIAWELSDEARKAGDPRLLSEAEEAREQAKRLWEEVLSGDWDTIVEAHLKLLELLAKVEKTKEKWEKKK

SEQ ID NO: 2843 - protein, 259 aa, synthetic construct
  REGION 1..259: note = Synthetic
SEKKFKLNWLLFLIQELVQQVKRLVEAAGNPELEREFKKILELIEDLLEKVHKAGKDEEAFQIARLALLAAQILRVVIKVQLLLRETGNPELKREFKEILELILRLIEEVLKAGKDSEAEKVARLALLAALILLLVIEVAQLLRKAGNPELEREFKKILELILKLIKEVLKAGKDEEAWVIAVLAYIVAKILSLVIEVQLLLRALGNPEDREEFERRLEEILRLIEEVLKAGKDIEASEKALEAFERALKLSEEIAKRL

SEQ ID NO: 2844 - protein, 259 aa, synthetic construct
  REGION 1..259: note = Synthetic
SEKVQTLLTLAFKILELVQQVKELVKEAGNPELERTFKKLLELIEALIEKVERAGKDEEAFQIARLALLIAKILRLVITVLKLLREAGNPELEREFKEILELILRLIEEVLKAGKDEEAEKVARLALTVAKILLLVIKVALLLREAGNPELEREFKKILKLILELIREVLKAGKDSWAFSIASLAAIAAKILLAVIQVQLLLRKAGNPELREEFERRLEEILRLIEEVLKAGKDDEAVKKALEAFKRALALSNTIDARL

SEQ ID NO: 2845 - protein, 247 aa, synthetic construct
  REGION 1..247: note = Synthetic
DEELLKELKKEFERQVKRFKEAAKRGDQEEAATASQIALMLLKLVLAIEAVKQILEKAKKTVSPELLELLKALAEEVRRQAKKVLELLKRGDIEKAQKHLRIALELAQLIEAILRVAEILREAAKTVSPEVLELLKQLFEEVYRQAKKVLELFARGDIEKALQHLKIALELAALIRYILAVMKILATAAKKVSPSILEELKKLSALVYELAEFVLRALARGDETIAQAALSFALAVAQYILELLKLT

SEQ ID NO: 2846 - protein, 258 aa, synthetic construct
  REGION 1..258: note = Synthetic
SIELLKLLNALYEAFETLRELLEQAEANGDPETSRQLKELLRTVAEMIERARKARSEQEIKLLLLFAKLIKAFATLIQLLLQAQENGDPETSRQLKKLLKQVKEMIERARNARSEEEYRILELVAKLIEAFATLIQLLLQAQENGDPSTSKKLQELLRAVLEMIARARNARSEEELLLLFLVAELIKAFATLIQLLLLAQKNGDPETSRKLEELLREVKEMIERARKARSEEEILKLSLKASEILKRAKEIAEELAKT

SEQ ID NO: 2847 - protein, 248 aa, synthetic construct
  REGION 1..248: note = Synthetic
TTELYKANHEANTIVTLAETLGDPEAIELARQLQKQIERLIKEYAKTGSEEAKRQLEEVLRLIQMLLLAIKIVKLARELGDPEAIKLAEELLKQIVRLIKEYRKTGSEKAKKALETVYELIAMLSLAIRIVLLARALGDPAAIELAEELLKEIVRLIKEFLKTGSEKARKQLETVAALIRFLSLAIRIVLLARKLGDPEAIREAEELLRQIVRLIKEFLKTGSEKAWKALFEVALRINKLALKIKRKI

SEQ ID NO: 2848 - protein, 248 aa, synthetic construct
  REGION 1..248: note = Synthetic
SEELMKYLYAALALVANAEILGDPEAIELARQLLEEIERLIKEFEKTGSEEAKRQLEEVYRLIQLLQLAINIVLLARRLGDPEAIKLAEELLKQIVRLIKEFRETGSSEAAKQLETVKELIEMLASAIKIVLLARALGDPEAIELAEELLKQIVRLIKEYLKTGSEEARTRLEQVFWLIEALLAAIRIVLLARELGDPSAIKEAEELLKQIVRLIKEFLKTGSEEALEQLVRVLAKISALALKIKLKK

SEQ ID NO: 2849 - protein, 228 aa, synthetic construct
  REGION 1..228: note = Synthetic
SELLLLSLTLQDQVEKLKAELKGKSEEQKKELKKLIELFEKAIKVFQLAAMAITAGVDEEMVRTLKQLLRQLQELLEELKGKSEEEFEKLRKLIELLLAAIEVFAHAAMAIRKGVDEEMSQTLKELLRALKKLLEELKGKSEEQFEKLRALIELLLKAIHVFVHAALALAEGVDEEMAEKLRRLLRKVKKLLEELKGKSEEQFREISEKIEELLKKIFATVVEALKRR

SEQ ID NO: 2850 - protein, 213 aa, synthetic construct
  REGION 1..213: note = Synthetic
LELAVHFALALALELRAMGFDEELIRLVETILEEAQRKAAMGIDVSRSVELALWVAQAALMAAALEKMGFDSELIELVLEILKQALKAHAMGIDVAKSVWFALAVAAAAVAAAQLQQMGFDEELIKLVNEILKKALKNWAMGIDVLKSILLAYQVAVAALAAAKLEAMGFDSRKIAEVLEILKRALRNHAMGIDVSESVNKAQKKAFELLKEV

SEQ ID NO: 2851 - protein, 208 aa, synthetic construct
  REGION 1..208: note = Synthetic
DEEFVKLLAENAERLAKNIEDESILKLVAEMIEKVKRLIANGRVEEALALALVLNAVLLAWFAARNIEDEAVYKLVKEMIKKVLELIKNGRLEDAFKLAKVLLLALAAWHVARNIEDERTHKLVREMILKVLELIKNGRVEEATKLAHVLLLLLKAWELARNIEDESALRWVQTAILLVLKLIKNGRVETATFLAELLLLQLEFELRT

SEQ ID NO: 2852 - protein, 225 aa, synthetic construct
  REGION 1..225: note = Synthetic
DIEELAVTINAMLSEATYRGDEDTLEHAERLLEALETVKRAEEDIKRLEKEWREKGDERNRRIAELLKKVIQEILEAVKKGDEDTIKHALKLLKALLAIAQAASRIKKLKQEARETGDERNRRIAELLEKVIQLIIEAVAKGDESTLAFALLLLSVLLTLADAVEDIKRLKKRWEKKGDEHNREIAERLEKVIEEIIQAVKKGDIDTILDAQYKLMLLLAEAKKV

SEQ ID NO: 2853 - protein, 204 aa, synthetic construct
  REGION 1..204: note = Synthetic
SLLEKSVKKTAEQILKLAKALGQEEFYKLARKMLKEVDSGDKKEIAQAHEILAVALLALRILEKARKLGQEEFFELAKEMLKKVQSGDESEIAKAYRILLVALLALQILELARKLGQEEFYELAKEMFKRLLSGDDTEIKRAYRILQVALLALRILELAEELGQEEAFKAAEKLLKDVNSGDETMIRAVHNALAEALRELEKER

SEQ ID NO: 2854 - protein, 209 aa, synthetic construct
  REGION 1..209: note = Synthetic
TEESVTLALMAAQTAVENAKNEEFKRLAQELIEKARRLAANGDVEKAAKLASLLVLLFEALKRIRNAKNEEFARLFQELILKALKLAKNGDVEKALKLAQVLALLLKALELVANAKNEEFMRLAKELILKALELAKNGDVEKALKLAKVLYLLLRALELVRNAKNEEFARFAEALILKALKLAKNGDVEKALKLAHQLKKALELSANAE

SEQ ID NO: 2855 - protein, 232 aa, synthetic construct
  REGION 1..232: note = Synthetic
TESELKLLATMARAILTAAYEAANSEEVAKFVEKIEELIKEAEELSKKDERKAETLLRLVYKAAQALAILISALQQANSEEVKRFVAKILRRIEEALELSRKDEEKAKAILELLYLAAQAIWILILALQQANSEEVKKFVKKILRRIEEALELSRKDHVKAAAILWLLYRAAEALLSLIEALQKKNSEEVKRAVKEILRLIEKALELVRKDEEKAFKLLAKLLFAAQQILIK

SEQ ID NO: 2856 - protein, 252 aa, synthetic construct
  REGION 1..252: note = Synthetic
SEESIRLNLKLEELITEAEEALQAGDPDKLAEAIEKLKAMVEELQRESEKAEKEGDAFKLLNVLDLLLKVLKTLAEIALKAGDPSLLKEALKRLEKMVEELERLSKRAEKEGDSFLLALVLKLLLKVLQTLAEIALQAGDPDQLQKAIERLEAMYEELKRLSERAKKEGDSKLLNTVLKLLLQVLQTLAEIAEKAGDPSQLQKAIELLKAMAEELWELLERAEKEGDLELLYTVVQLVAAVHLLLKKLEKRQ

SEQ ID NO: 2857 - protein, 252 aa, synthetic construct
  REGION 1..252: note = Synthetic
SEEALRLQLKLERLITEAEEALRAGDPKKLQEAIEKLKKMLEELKRESEKAEREGDAFHLSQVLALLVQVLQTLAEIALQAGDPSKLQEAIEELEKMVEELERLSKKAEKEGDSFLLAILLKLLLQVLQTLAEIALKAGDPDQLQKAIERLEAMYEELKRLSARAKKEGDSKLLNTVLKLLLKVLQTLAEIALKAGDPSQLQKAIELLKAMAKELKELLERAEKEGDLELLQTVLNLLAAVLLLLEKLEKRK

SEQ ID NO: 2858 - protein, 252 aa, synthetic construct
  REGION 1..252: note = Synthetic
TEYAVSLYLKLERLITEAEEALQAGDPDKLAEAIDKLKKMLEELERESERAEREGDAHALAAVLELLFKVLKTLAEIALQAGDPSKLQEAIEKLEQMVEELQRLSKRAEAEGDSWLLAIVLKLLLDVLQTLAEIAKKKGDPDQLQKAIKRLEQMSEFLKRLSERAKKEGDSDLLNTVLKLLLQVLQTLAELAEALGDPSQLQKAIEELKKMLEDLTELAKRAAKEGDLKLLLTVTKLIAHIKLLLEKIAKRV

SEQ ID NO: 2859 - protein, 252 aa, synthetic construct
  REGION 1..252: note = Synthetic
SEEAVKRYLKLETLITEAEEALRAGDPDKLQEAIEKLKKMLEELERESERAEREGDIFTLAAVLELLFKVLQTLAEIALQAGDPSKLQEAIEKLEEMSEELKRLIKRAEAEGDSYWLAIVLKLLLAVLQTLAKIALKAGDPDQFNKAIAELEKMSEELFRLLEAAKRKGDSELLNTVLKLLLKVLQTLAELAEQAGDPSQLAKAKEQLKAMLEWLTDLSKRAEKEGDLKLQLTVVKLIATVKLTLKKIAKRV

SEQ ID NO: 2860 - protein, 252 aa, synthetic construct
  REGION 1..252: note = Synthetic
TEEAVKRQLKLETLITEAEEALRAGDPDKLQEAIEKLKAMSEELKRESKRAEKEGDLFTLAAVLQLLLQVLQTLAEIALKAGDPSKLQEAIERLEEMSEELQRLSKRAEKEGDKDKLAFVLKLLLQVLQTLAELAYRAGDPSQLQKAIARLEQMSEELWRLLKRAAAEGDKKLLNTLLKLLLQVLQTLAEIAIRAGDPDQLAKAKEELKAMLEFLEELLERATKEGDWELLWTVVQLYATVLLTLEKIAKRV

SEQ ID NO: 2861 - protein, 239 aa, synthetic construct
  REGION 1..239: note = Synthetic
TEELLKLTMEVLKVITKAKKAYAAGDSRKLEEAREELKKLFKKMKEIVKKSTDKRTILQALALLVQLVITFAKLARAAGDEDSLEEARQLLQELFEEMLAIVKKSTDSHTIAVALKLLVQLVITFAEIARAAGDEESLRKARELLEKLFQEMQKIVKESTDKSTILTALELLVQLVITFAKIARAAGDERSLERALELLAELFREMLKIFEESTDEETANTALNLAARLVVTYEEIARA

SEQ ID NO: 2862 - protein, 256 aa, synthetic construct
  REGION 1..256: note = Synthetic
DETLKVLVTVALMLVEYALAIAEALGDPQSVQILRELLEQLKRLLERLDNGIDAEKIKEQIELMVKVLVAFASVIAALEIAKKLGDPDSVQQLRELLQILKELLDKLFNGIDRERIKEQIELMVKVLQAFAALIKATAIAKALGDPDTVQALKELLQALLELVKKLKNGIDFERIKEQIDLMVKVLEAFASLIEATEIARKLGDPKSVKFLQKLLKTLKELAERLKNGIDFERIKKEIEEMVKLLKKVAKMIKSLK

SEQ ID NO: 2863 - protein, 282 aa, synthetic construct
  REGION 1..282: note = Synthetic
TLEILELLHKLFNVASRAKEMLTEAKKEGDPELIEFAKWVLEQAERLLKRLKELLHVPEEELRKELETIKLLAKLLEVLVRALQMLTEAKREGDPELIQNAAEILEQAVRLIEKLEELKNVPEEEYKKAIQTIKLLAALLEVLVRALAMLTEAKREGDPELIQNAKEVLEQAKRLIKKLEELKNVPEEEYKRDYSLIALLVYLLAVLVRALEMLTRAKREGDPELIEKAQRVLETAKKLIEKLEALKNVPEEEFTEELEKIIEEAVRLSHRVAALREEFEAK

SEQ ID NO: 2864 - protein, 221 aa, synthetic construct
  REGION 1..221: note = Synthetic
SESELLKAFQLIYNVAYLASALGDPSSKAMVEQLKRALEEAKRAGDERKLRRILRFAKALLLILQVAQLAKELGDPRAKKMVEQLSRAWREAFETGDEDKLEFILRLAKALLLILQVAQLAKELGDPRSKEMVAQLQQAWREAFEEGDERKLEFIEMLAAALLHILQVSRLAKELGDPRAQEEVEKLQREWKEAFETGDSKRLVDIYLKAVELLIKLREEQ

SEQ ID NO: 2865 - protein, 258 aa, synthetic construct
  REGION 1..258: note = Synthetic
SQEFQRVFELVQKALEELMRLYEQAKRLGDPRTLEQLERLLKDLYKMMLRVLKEGDTRILKELEVYAKVALAIAKLIELYQAAKRRGDPDTLEQLEQLIQHLQTWLERVKKKGDTRILKFLEVFAKVADAIAELIRLYQKAKDAGDPDTLEQLRQLIETLQRMIRRVEERGDTRILKFLDVLAMVAKAIAELIKLLEKAKEAGDPRVLEKLEQLIKKLLKMLRRLEEEGDTKILSELATLAAYASAVAALIKLELFLK

SEQ ID NO: 2866 - protein, 258 aa, synthetic construct
  REGION 1..258: note = Synthetic
SQEFQRVFEEVARALDELMRLYEQAKRLGDPKTLEQLERLLKFLYKMLQRVLKRGDSRILKELEVLAKVAKAIAKLIELVQQAKRLGDPRTLEQLEQLIAKLQTMIERVEKRGDTEILKFLEVLAAVAEAIAELIRLYQAALREGDPDTLEQLQQLIETLQTMIRRVEERGDTRILEFLQVLANVAKAIALLIKLYQKAKKDGDPDTLEKLEQLIKKLQTMIRRVEERGDTSILSELAKLAAEATAHAILIKLELFFK

SEQ ID NO: 2867 - protein, 258 aa, synthetic construct
  REGION 1..258: note = Synthetic
TSEFTRVFKAVETALKELFRLLDEAKALGDPRTLEQLERLIKILETMLKRVLKTGDTRILAILEVLAKVALAIAKLIELYLQALRDGDPDTLETLEQLIALLQTMIERVLKSGDTEILKFLAVLATVAEAIAELIRLYQKAKERGDPDTLEQLQQLIEFLLTMIRRVFERGDTAILEFLAVLANVAEAIAELIKLYQKAKDLGDPDTLEKLEQLIKKLQTMIRRVEEEGDTKILKELATTALKAMLTAAAIKREQEKK

SEQ ID NO: 2868 - protein, 199 aa, synthetic construct
  REGION 1..199: note = Synthetic
TEASLEQALFTAEMVVKMAKALGDPKLIEVAKELKRELEEMVRRTRTARGEEYEEIARRFKQITTLIEALYIALAVLMMARKVGDPQLIEVAKQLLSTLAEMVARTRTARGEEFKEIQDKLAQIMHLIAALYLALAVLEMAEATGDPRLIEEAKRLLKQLAEMVERTRTARGEEHEEIQKRLAEILKQIADLAVTLMRK

SEQ ID NO: 2869 - protein, 197 aa, synthetic construct
  REGION 1..197: note = Synthetic
LEEAFRELTKQLEEALKALFNGIDAEKLLKHAAALSKMLALLTLAEAVYELAAALGDPELIEAAKQLLEKITEIVKLWLNGIDAERIEEQLQELYEMAWLLYVALQVFFAALKVGDPKLIRAAKKLLKQIAEIVKKFLNGIDAEDIKFQWLLLQLLAQLLAYALRAWEKAAKTGDPRQIKDAEEKLKKLAEKVEKLT

SEQ ID NO: 2870 - protein, 197 aa, synthetic construct
  REGION 1..197: note = Synthetic
LEEAFRELTKALEKALAALRNGIDAEKLLEWAKALSKMLELLQLAEAVFKLALKVGDPELIEAAKQLLEKITEIVKLWLNGIDAERVEEALQELYEMAWVLYVALQVFELALKVGDPKLIRAAKKLLKQIAELVKKFANGIDAEDIRFDLILLQLLAQLLAHALREWEEAAKTGDPRQIKAAEEKLKKLAEKVEKTT

SEQ ID NO: 2871 - protein, 255 aa, synthetic construct
  REGION 1..255: note = Synthetic
DEEFKWMLKYADLAAKHLEKIAKKTGDPAIKEVAKEIQRAIQELKEQFERSPTEDLKAALEFILMLATAAVLAANLLAIADETGDPQIRRVAKEILRLVKELIKEFKRSPTEDLYRELEFILMLAEAALLAALLLLIAKETGDPQIKRVAKRIFERVLELIKEFARSPTEELFRQLEFILMLAKAALLAAKVLKIALELGDPRLLRLAKEILKTVEELIKEFQRSPTEELLEKLKLVLALAKLALWHAEELKRDQ

SEQ ID NO: 2872 - protein, 255 aa, synthetic construct
  REGION 1..255: note = Synthetic
SEEFEFALHHAKLAAKLLEKIAKETGDPLIKEVAKEIQRAVDELKEQFERSPTESLKRALEFILMLAHAAVLAAAVLLIAQETGDPQIRRVAKQILRLVLELIKEFKRSPTEQLLRELEFILMLAKAALLAAKLLLIAKKTGDPQIKRVAKRILERVLELIKEFARSPTEELFRQLEFILMLAKAALLAAKVLLIAKETGDPSILKYAKEILRRVEELIKEFQRSPTEDLLEELKAILRAAETALETAKIAKTVQ

SEQ ID NO: 2873 - protein, 255 aa, synthetic construct
  REGION 1..255: note = Synthetic
SEEFEFALHNAKLAAKLLEKIAKETGDPTIKEVAKEIQRQIDELKEQYERSPTESLEKALEFINMLAWAAMLAAKVLLIAQKTGDPQIERVAKQILRLVLELIKEFERSPTEELLRELEFILMLAKAALLAAKLLLIAQETGDPTIKRVAKRILERVLELIKEFARSPTEELLKQLEFILMLAKAALLAAKVLLIAEETGDPSIRKYAAEILRRVEELIKEFQRSPTERLLEELKSILRAAEKALETAKIAATLK

SEQ ID NO: 2874 - protein, 196 aa, synthetic construct
  REGION 1..196: note = Synthetic
SEKEQKKLNEAFLAASEIYLIALSLGNPELLEAAKALLKELDTLSKQFKRSPTEELREKIDFVLKLARAMLLAAKIYAIAKEAGNPKLREAAKQVIRLLTALLRRFKKSPTEELREQLEFLLALAKAMVSAAAIYALAKTAGNPELREQAERVIEELLRLLQQFKRSPTEQLRRELERLLREATKMQLRAAKETAK

SEQ ID NO: 2875 - protein, 221 aa, synthetic construct
  REGION 1..221: note = Synthetic
SIYEQATAWELIEKVAQLARELGDPRSKEMVEQLFKQLLKAQETGDEDKLRRILRLAAALLLILQVSKLAKELGDPRSQKMVEQLSRAWREAVETGDESKLEKILKFAFALLLILQVAQLAKELGDPRAKEMVAQLQKRWREAFETGDESKLEKILAQAWALLLILKVARLAKELGDPSAKDEVEKLQREWKEAVETGDDKRLQEILVKAQKLWLKLRKKQ

SEQ ID NO: 2876 - protein, 213 aa, synthetic construct
  REGION 1..213: note = Synthetic
EEKERKELKKTLTDAAFAASQVLLLAALSGDPLIAKVAKQLLKFIEKMKEELDKAKSEEELKELAKRVKLVLLLAEAAFAAALVLKIAQESGDPSIEEVAKELLRVVTELLKELEKAKSKEELDELKKRVELVATLAKAAHAAALVLLAAQKSGDPRLLEKAKELLKKVLELLKELKKAKSEKEIKELERRVNQVLAEAVKAAKEAAAALLEQ

SEQ ID NO: 2877 - protein, 213 aa, synthetic construct
  REGION 1..213: note = Synthetic
EEEDRKALQYALAKARDLARKVKEIADKSGDPLIKEVAELLAKIVEKLAEELKKAKSEEELHELSVRVWLVLALAKAALLAAQVLLIAQKSGDPRIEEVAQELLRLVTEMLKELEKAKSEDELKELLERIKLVLLLAKAALLAAQILLIAQKSGDPRILEFAQELLKTVTKMLKELKKAKSEEEIHKLHQKVWLVALLAEQALREAEAALKEQ

SEQ ID NO: 2878 - protein, 259 aa, synthetic construct
  REGION 1..259: note = Synthetic
TEEFKKLVLHAEYLIHRVRLALIRIRADATDPKFEELLRRAKRLLEKAERLLREYTSEEVVKFAMLLARALLLILKVLELLLEIRARATDPQFRELLEQALRLLKKALQALAEYTSEETVKFAMLLARALELILQVLLLLLEIAARATDPQFRELLQKALELLRKALKLLEEYTSEEVLWFAMVLAAALKLILEVLLLLLDIRARATDPRFREELQRALELLKKALALLEEYTSYEVLVTAALLALHLAVQLYALLRAL

SEQ ID NO: 2879 - protein, 259 aa, synthetic construct
  REGION 1..259: note = Synthetic
SEEFKSLATHAKYLILRFRLELIKIEKKATDPQFEKLLRLAKRLLEKAERLLKEYTSAETVKFAMNLARALLLILAVLELLLEIRERATDPQFRELLEQALRLLEKALQELFEYTSEEVVKFAMLLARALQLILAVLQLLLEIAERATDPQFRELLQLALALLRKALELLSKYTSLEVVKFAMSLALALVLILEVLQMLLEIAERATDPRFREELQRALEKLKEALALLFKYTSSEYVQTAVLLALKLAVRLAKLLAQL

SEQ ID NO: 2880 - protein, 207 aa, synthetic construct
  REGION 1..207: note = Synthetic
TEELEKKLTLLEMQAYAAHQNGDEQKYRLYLLLVYLLRLIISAQEQAAETGDQRMRELLKELEKLLEQAFEALKNGDERRFELYIRSVFLLLLIIEALKTARETGDQRMRELLKKLQKLLEQAQEAEKNGDEQRFRLYISSVYVLLLIIKALKIAQETGDQRMRELLKKLQKLLDAAQEALKNGDEERFRQLSSTVLALLLQIFKEK

SEQ ID NO: 2881 - protein, 207 aa, synthetic construct
  REGION 1..207: note = Synthetic
TEELEEKADKLQEAALEALANGDLEKATLAQTLSEVLQEIIEAQKQAAETGDQRMRELLKELEKLLEAAFEAFKNGDSSRFELYIRSVKVLLAIIKALKIAAETGDQRMRELLKELFKLLEQAKEAEKAGDEDRFRLYIQSVKVLLAIIEALKIAAETGDQRMRSALETLFKLLKKAQEALKNGDEEKFKTAITLVELALKFIKNAK

SEQ ID NO: 2882 - protein, 207 aa, synthetic construct
  REGION 1..207: note = Synthetic
TEELEEKADKLNETALKAVANGDLTKARLAFTSVEVLTEIIEAQKQAAETGDQRMRELLKELEKLLEQAQEAFKNGDESRFELYIRIVKVLLAIIKALKIAKETGDQRMRELLKELFKLLEQAKEAEKNGDEDRFRLYIASVKVLLLIIEALKIAKETGDQRMRNALETLQKLLEKAQEALKNGDEEKFKTIITLVELALKAIKHAK

SEQ ID NO: 2883 - protein, 207 aa, synthetic construct
  REGION 1..207: note = Synthetic
SEELWEKLKKLAEQAAEALANGDEKAARLYETSHRVLQAILRALKAAAETGDQRMRELLKELFKLLEQAEEARKNGDETRFELYIRSVKLLLALIKALKIAAETGDQRMRELLKELFKLLKQAQEALKNGDEKRFRAYIASVKVLLAIIEALKIAKETGDQRMRETLKKLQKLLEEAQEAFKNGDDTKFKVAIWLVELLLALIKSAK

SEQ ID NO: 2884 - protein, 207 aa, synthetic construct
  REGION 1..207: note = Synthetic
SSELQLALFLLKHQAEEARKNGDEQKFRAYEESLKVYEQIKYAYLLATSKGDQRMRELLKELQKLLEQAQEAFKNGDETRFELYIRSVKVLLAIIEALALAKETGDQRMRELLKELQKLLEAAQEAEKNGDEKRFRLYIESVEVLLNIIFALAIAKETGDQRMRELLKKLQKLLEAAQEAFKNGDEERFRELIKRVQALLAAIWKLV

SEQ ID NO: 2885 - protein, 243 aa, synthetic construct
  REGION 1..243: note = Synthetic
SDELKSAALQIQAILMELEALVERIPDPDFSSQLRDKLEKLQRAAEEALANGDEERMKLILLAAQILWFLAQLQVLVKEIPDPDFSEKLRRNVQELLRRADEALANGDEEKMKLILLFAKILWFLVQLEVLVKRIPDPSFSEKLRADVEELKRQAEEALANGDEERMKLILTAAQILWLLAQLAELLKKIPDPRWSEEFARLVEELKRKAKEALANGDEEKMKAILHLARSLASAVKAAARRI

SEQ ID NO: 2886 - protein, 223 aa, synthetic construct
  REGION 1..223: note = Synthetic
SELQQASAKLLIWLVEVLASLMGDPRMEEIVKELKRRFEQVKREGDDEKLQRLQAFAWAAFLIALVYLAAEKMGDPRMLKIVKKLLEEFEQILREGDDEKLKRLLQQAKAAWLIALVLLLAKKLGDPRMREIAKELLERFEQIKREGDDEKLQRLLQQAKAAVLIAQLIELAKKLGDPRMLELVKTLLELFEKILRAGDDEALQSLLTAAEAAVLLAEFAAEI

SEQ ID NO: 2887 - protein, 248 aa, synthetic construct
  REGION 1..248: note = Synthetic
SEEYELLLTNIKLIEQAIEYAEKHGDSKAWEWATRNAQEVLERVKEYLRRAKEQGDDEKFWAALELMIKVIEALIELARQTGDDDLWKQARDSAQAVEREIKQKIREAEEQGDKEKFWKALRLMIRVIEALIRLAEIKGDSKLWEEARESAQEVLRKIKEYIRKAEEQGDKDAFWKALALMILVIEALIRLAQQTGDSRLWEEAARALEEVARKIKQYKREAEEQGDKEAIFAAWLLELAVWLAFKRL

SEQ ID NO: 2888 - protein, 248 aa, synthetic construct
  REGION 1..248: note = Synthetic
SEEFEKLETRLKYAAAAAEIAKILGDEEHWQEARRIAFELTRRIEEMLRRAEAQGDEEQIRKVLELLLQVAEILAKLAEIKGDSEVWELAKRLAKDLTEKIKKMLEAAFKKGDDSQIIKVLELLLKVAEILAKLAAITGDEEIWKLASEIAKDLTEKIKKMLEKAFKAGDESFIIKVLELLLTVARILATLAQITGDSDVWQKAQELAEELQKQIKEMAKRAYENGDSSQLEKVLQLNLTVAKILAQL

SEQ ID NO: 2889 - protein, 228 aa, synthetic construct
  REGION 1..228: note = Synthetic
PEKEELETRVLKLIEELVEKAKRAGDPRKINELMAVAEALKRLAEMFKKLKEIQERATDPQLQELAERVLRLIKELLEEAERAGDPRRIKELVEVALALAKLLQMFYRLKEIQEKATDPNIQELAERVLRLILRLLKEAEEAGDPRRIKELVAVALSLAKLLFMFYKLKEIQERATDPQIQRKAQEVLEKIKRLLEQAERAGDPRKIHYLVSLALLAAMELEVAAKKK

SEQ ID NO: 2890 - protein, 228 aa, synthetic construct
  REGION 1..228: note = Synthetic
PELDELWKRVKKLVTELLEQAERAGDPEEIFKLLEVAQQLLWLAEMFLRLAAIQEKATDPEIQELAERVLRLIKRLLEEAERAGDPRRIKELVEVALALAKLLEMFYRLKEIQERATDPEIQELAERVLRLIKKLLKAAEEAGDPRKIYKLVFVALVLLHLLQTFYRLKEIQEKATDPEIQRKAQEVLEKIKRLLEAAERAGDPAKILLYVIRAQLLAMELKFAYRKR

SEQ ID NO: 2891 - protein, 252 aa, synthetic construct
  REGION 1..252: note = Synthetic
SAREANTVIALAFKVYQLLKEIAEQVPEEVAQRMRELAEKLLEKAFKAAASGDEKELKELSRLLQVILLALQVFQLLVQIANNVPEEFAQKMKELAEKVVQKAKEAAESGDEEELRRLQLLLYVILVALQVFQLLDQIAKQVPEEQAQRMRELAYKVVEKAKRAAESGDEEELKRLALLLMVILQALKVFQLLLQIAKQVPEEEAEEMKRQAEKVVQKAKEAFESGDEKQLLKLSLELTEELWKLKVEQKDT

SEQ ID NO: 2892 - protein, 314 aa, synthetic construct
  REGION 1..314: note = Synthetic
TEEELERLAKRVKLALKLLRAAATTLKALYKKYGDEQARRALELIKRLEEQLKKLFEQIKELIERGDPRWALIVELLRLLIEVALAVAEAIQAMYALADYYKRRGDERAKELVELIAELLEQLEKLFKQIKELVEKGDPRWALIVELLRLLIEVAKAVAKAIKAMLALHDLYARTGDSQAEALVDLLLKLLKQLKELFEQIKELLERGDPRYSLILQLLRLLIEVAKAVAELIEAMIALFELYKRTGDETARRLLEEIQRLLEALRKLFEKIKELLERGDPRWEEIRKKLEEAIEYAKTLAKIIKYWIHSRELK

SEQ ID NO: 2893 - protein, 283 aa, synthetic construct
  REGION 1..283: note = Synthetic
TLNIKLAATEALIQLKLALERAKETRKKTGDSQAERLIESLDKMIKLLEELIQRIAETGDPRLYEILRLIIEAAKAIVALIKALEDAKRLLERTGDSQAARLIESLQWMIEELLTLIQAIKETGDPRLVKILKHILQAAKAIVSLIKLLFRAKELEEKTGDSQARRLIEILQKMIELLLELIKRIKETGDPRLLYILNLIVFAARAIVALIEALQRAVELLAKTGDSRAEELIRRLQEMIEQLLKLLQKIKETGDPRLIAKLEQIVREAFFLVARIEKEQANV

SEQ ID NO: 2894 - protein, 257 aa, synthetic construct
  REGION 1..257: note = Synthetic
TEEDIQLLSNKIIYILLLAFYLVAEVGDPRNEERLREIMRRAKEAQKELEERGDLEKVERYLKILLLAAKIIYILLAALKLVQELGDPELEELLKEIMKRAQETLQELLARGDDEKLLRSLKALLLFAKIIYILLQALQLVKAVGDPEALELLKKIMRAAAKTLRELKERGDDEKLYTALRILLIAAKIIYILLEALKLIQKAGDPRNKEKLKQIMRKALETLEEVAKKGDLAKALQTLMDLLLKALKIALKLARQL

SEQ ID NO: 2895 - protein, 257 aa, synthetic construct
  REGION 1..257: note = Synthetic
TKLDIQILSNEIKFILMKALALVREAGDPRLEELLREIMRRAEETLKEVEERGDDEKAERLLKILLLFAKIIYILLLALKLVEELGDPRLKELLLEIMARAAETLEELLKRGDLEKAERALKILLLFAKIIYILLQALQLVRAVGDPANLRLLLKIMDQALKTLRELLERGDDEKAYTALRILLLLAKIIYILLAALLLVQKAGDPRNEEKLKQIMKKAFETLDEIRARGDDQKAMQALWDLLLKALEIALKLKAQL

SEQ ID NO: 2896 - protein, 234 aa, synthetic construct
  REGION 1..234: note = Synthetic
PELETLLKIIQEIVEEIKRRAEQTGDESKVTELTKLAIAAQKLAVAYAEVVALFEKFADDPRTFELLKIILEIVLEILKKARQTGDEKRIKELFELAFEALELAKLFAKVVELFEKFADDPETFELLKTILEQVEEILRKARQTGDERRIAELFRLAQQALRLALAYAKVVEFFEKFADDPRTFQKLKEILERVKRILAKARQTGDEKTISKLMLEALLALLQALSTAILEEVK

SEQ ID NO: 2897 - protein, 223 aa, synthetic construct
  REGION 1..223: note = Synthetic
SEKEKEFLKALEYILRASKMAKEMGDPKFREAVKRLNDQFKEVLKKGDERALKWILKVAKALWYIVAASKMAAEMGDPKFREAVARLLDKFLEVLRKGDESALEKILEWAAALWYIVLAAKMAAEMGDPKFRAAVKWLIQKFLELLAKGDEDALRFIYLAAAALWLIVLAAKTATEMGDPRFREKVERLIQAFLEVLKKGDEDKLKEIFLKALLLWLELHNTK

SEQ ID NO: 2898 - protein, 192 aa, synthetic construct
  REGION 1..192: note = Synthetic
PHSKLQKLIKLAQKLSEKLTKAERRNDERQLREVWEEIAEMLEKVKQLLEEAEKRGDPKAILAALWLLWAALQILLEIAERRNDEEKLKWVFEFIAFMLKLVKRLLEEAERRGDPELILYLLELLWQALKIVLEIAKQRNDESKLREIAKFIKEMQRLIKRLAEEAHKRGDPVLAAAAHELLEKAERIKQKI

SEQ ID NO: 2899 - protein, 192 aa, synthetic construct
  REGION 1..192: note = Synthetic
PEEKLLKLEAKWRYLSAKLNEAEQNNDEKQLKEVFEEILKLLEKVKELLEEAEKRGDPRLILRALELLWRALQKLLEIAESRNDEDKLRKVFEYIAEMLKIVKKLLEEAEKRGDPELILAALKLLLLALHIALNIARRRNDEDKLKEIAKFIEEMQKLVKKLLEEAKRRGDPYLLTAAKLLLKLAELHKQQI

SEQ ID NO: 2900 - protein, 249 aa, synthetic construct
  REGION 1..249: note = Synthetic
SHETLVKLFVTIIELQVTAVKVAKRNDEDKLREIIKKIEEILKTAFKLIEAAKRAGDMETILTALKIVILALHVMAQLVQAKNDKDQLAKIIKNILRIIEDAQRLIERAKAMGDMESILRALDIVIKALKVMAQLVQQRNDESLLQEIKENLERIIEDAQRLIERAKQMGDMETILRALEIIIKALEVMAELVKAHNDSEQLARIRKNIKRILEDALRLVKRAAAMGDMSTLEKAFAILQKAAEVLAEN

SEQ ID NO: 2901 - protein, 249 aa, synthetic construct
  REGION 1..249: note = Synthetic
DHETLVKLLYRIAVLYVAAVHVQKRNDESKLQEIIEKIQRIIEEAFKLIEAAKRKGDMDTILTALDIVILALQVMATLVQQRNDESQLDEIIKNIERIIEDARRLIERAKKKGDMESILRALDIVIKALQVMAQLVKARNDEEQLQKILETIEAIIEDAQRLIERAKAMGDMETILRALKIIIKALEVMAQLVKARNDEEWLARIQKNLSRILKDALKLVERAVKMGDMESIKKALAILFAAAKVSQEN

SEQ ID NO: 2902 - protein, 249 aa, synthetic construct
  REGION 1..249: note = Synthetic
SELTLELLEELIRHLQKAAEEVRKRNDESKLQWIIKAIQAIIKTALKLIEAAKRAGDMSSILRALKIVIDALQVMAELVQQRNDEDQLREIIKNIERIIEDAFRLIERAKKMGDMYSVLTALKIVIKALAVMAQLVAANNDEEQLQKIIENLEKIIETAQRLIEKAKEMGDMTEILIALLIVIKALEVMAELVKRRNDEEKLQKIKRNIERIIEDAERLIERAEAMGDMFSVHLARIIVEKARRVKAAL

SEQ ID NO: 2903 - protein, 249 aa, synthetic construct
  REGION 1..249: note = Synthetic
TEETLKKLEEKIKLLQFLAALVASFNDSKALQEIIEKIKAIIATALKLIEAAKRKGDMESILRALDIVIKALQVMAQLVQQRNDEDQLREIIKNLERIIEDAQRLIERAKAMGDMETIFTALEIVIKALQVMAALVSANNDESQLKKIIEEIAKIIEDAQALIERAKKEGDMESVLRALDILIKALAVMAHLVWARNDEEQKRRIQKNIERIIEDAERLIERAEAMGDSESVEKAEKIVEKARLVKKFV

SEQ ID NO: 2904 - protein, 284 aa, synthetic construct
  REGION 1..284: note = Synthetic
EETLQTLLKLFEKMARIVEEAVKKAEKAGDQAAAEAARKHLEMLKKIMELIARLLKERAAQTGDPRERLAILFKLFELLAKLVKLFVLAAKVAGDQRAAEQALELLKKLKEIMEKISKELQEKVAQTGDPQEQLEILQKIFQLLAELVKLFVLAAQVAGDQRAAEQALELLDELEKIMEKIERALKEAAKQTGDPQKELEILFKLFELLAKLVELFVLAARVAGDSRALEKAKEQLEALREIMEKIERKLKEKAAQTGDPTLEFIIKLLLQLLASDLKELERQA

SEQ ID NO: 2905 - protein, 284 aa, synthetic construct
  REGION 1..284: note = Synthetic
EEELKKLLLRFELLAAAVSLAVSLAALQGDQRTAEKALKLLEELKEIMEKISKLLEEEVKQTGDPQKRLEILQKIFELLATLVKLFVAAAKVAGDQRAAEQALELLAKLKKIMEKISRQLQEKVAQTGDPQEQLEILQKYFQLLAELVKLFVLAAQVAGDQSAAEQALELLKELEEIMEKISRTLKEQAAQTGDPRKELDILQKIFELLAKLVELFVLAARVAGDQRALEKAKELLQKLLEIAKKIYAKLVEAVNQTGDPSAYEKIAKTAKKLSKTLDTLAKQV

SEQ ID NO: 2906 - protein, 284 aa, synthetic construct
  REGION 1..284: note = Synthetic
STQLKTLEKIFEELARKVEEFVRRAAKEGDQSAAEKALELLERLKTIYELISKKLLERVAQTGDPQERLEILQKLFELLAKLVKLFVLAAKVAGDQSAAEQALELLKKLKEIMEKIARQLQEKVAQTGDPQEQLKILFKVFQLLAELVKLFVLAAQVAGDQRAAEQALELLEELEKIMEKISRTLKEQAKQTGDPQLEQAILFTLFELLAKLVELFVLAARVAGDSRALEKAKEQLEKLKEIMEKISRKLKEQAAQTGDPTDKTAIKIIVTWLKEVLEELERQA

SEQ ID NO: 2907 - protein, 204 aa, synthetic construct
  REGION 1..204: note = Synthetic
TKEAAEKALRKIKQYLKEAGIPAELAALALNLILKLVATGVSAERAFKYAKLALEALQKIKEYIERAGIPESLLEKALRLIVALVADGVSAERAYEYAKLALEALQKIKEYFERAGIPERLLELALDLIVKLVRAGVSAERAYEYAKLALEALQKIKEYIERAGIPEELLQHALELIVEAVLNGVSAETAAFMAKVSLEAAKTA

SEQ ID NO: 2908 - protein, 223 aa, synthetic construct
  REGION 1..223: note = Synthetic
TLLEFLQKSAKEAIARAEEMAKELGDPKFREAVQRLKEQFAEIERNGDERALKFIWALAAALWYILLAYKMAVEMGDPKFRAAVKRLIQRFLEVLKKGDEDALKFILKLAEALWYIVLAVKMAREMGDPKFRAAVEKLIQKFLEVLEKGDESALEFILKLAKALWYIFLAVKMAEEMGDPSFRKAVKTLLDVFLTVLDKGDEEILEIILKNAVRLWEEVARAR

SEQ ID NO: 2909 - protein, 208 aa, synthetic construct
  REGION 1..208: note = Synthetic
DSEEKAKIFLKLFQAALEAGVSVEEAAKMLNLLLTALKKAGARGEEAEKLLKELLEIFRRLQEKAKAAGVSEEKVKTMLELLIRALVEAGARGEEAEEFVRELLEIFRRLEQQASEAGVSEDLARTMLKLLIEALIRAGARGEEAQALVQELLEIFRRLEQKAKEAGVSEEKLKTMLYLLISALISVGARGELAEKLVDTLLKLARKN

SEQ ID NO: 2910 - protein, 231 aa, synthetic construct
  REGION 1..231: note = Synthetic
SEQQELYKELEAIKSQMELAERAGDEQAIRDAFEKALEILKKLEELSRNADPEDQVTALLAILLAIQVLMKWAERAGDEEQIRRVFEKALEIKEKLEQLSRNADPELQVLALLAILRAIQVLYQWAERAGDEELLERAFRDALKITEKLEKLTKHADPELQVLALLAILVAIQVLMAWAERAGDEEQLRRAYEKALEIFHKLLKLVRNADPKLVALALKALALAAELLKKV

SEQ ID NO: 2911 - protein, 231 aa, synthetic construct
  REGION 1..231: note = Synthetic
SAVEALYWWLLIIATEMKAAEERGDEEAIREAFENALEVTEMLEKLVANADPELQVLALLAILIAIQVLMDWAERAGDEEQIRRAFEKALEITKKLEELVKNADPELQVLALLAILRAIQVLMQWAERAGDEEQIERAFRKAKEITEKLEKLAANADPELQVLALLAILVAIQVLMRWAERAGDEEQIRRAYEKAREITEKLKKLYKNADPELVLTAYEAIKTAEEVLKKY

SEQ ID NO: 2912 - protein, 257 aa, synthetic construct
  REGION 1..257: note = Synthetic
SESHVDTNLALLVEVFAQKIKEQLDRGVLDEKKQKEELLEMAKTLFEVLKEAGVPEEQILRAIAKVVLELLVQIFKIQVRKALKRGVLDESTLEERLLKMARLLKEILKKAGVPEKDILAAIAELVLELLLDIFITRLREALDRGVLDEDTQEEELLKMAELLWRILKKAGVPEEEILRAIAHLVLKVLVDIFATQVRKALKRGVLDEETRKELFKKMAELLRRILKKAGVPEDDIEAAISQLFWLAKMDIFLAEKK

SEQ ID NO: 2913 - protein, 209 aa, synthetic construct
  REGION 1..209: note = Synthetic
TEELLETAQEAAEEHEKTLEEMARQGDSSTFLSQQKALVEILALIAKFATDEEDKKRVLKQAEELFEKIRQQLEEMRRQGDWDTFNYLLRLLVEILAIIAKAATDEEDVKRVLEQLKQLAEWIKQQLEEMRRRGDSKTFNTLLELLVDILAILAEAATDEDDKEEVKQEAKELAEWIRQQLEEYRRAGDMDTFSALLKLLFKIKEILEK

SEQ ID NO: 2914 - protein, 247 aa, synthetic construct
  REGION 1..247: note = Synthetic
SEELEIQALLNRAQEWIHEYRKSGDPRAIEKAEELLERAKKKLEELLRQALAMGQWEQISTVISLLLQIAALWIQLYELSGDPKAIEAAEELLKRAEELLKELLKQAEEMGQFEQIEEVIELLLRIAFLWIKLYALSGDPRAIEKAERLLKQADELLKELLRQAEEMGQFEQILRVIELLLQIAELWIQLYKLSGDPKAEEKAKELVRTAKELLSELLEQAVKMGQKEQLEKVTELLEKIAKLEEKV

SEQ ID NO: 2915 - protein, 221 aa, synthetic construct
  REGION 1..221: note = Synthetic
DEEKLLKEIKKMVEEANEYLLRGDKEKAKELLDRIRKALQEVFETAKKKGDAEFLLRVIKLMVELALLYLVMGDDEAAKEILTKIRENLQEVFEIAKKQGDARLLLEVIKLMFKLAELYLRAGDEEAAKELLEKIRKNLQEVFEIAKKQGDAQKLLEVIELMVRLAELYQRMGDEEAAKELLKRIKKNLLELFQIAKEQGDSRLLTKLFELSQKLLALEKQ

SEQ ID NO: 2916 - protein, 240 aa, synthetic construct
  REGION 1..240: note = Synthetic
SFKFKLATFELLVYLNVVAEDAGMTEEQKKRLNERIRRIAERMLQKAEKAGEDQDTVTFLITTLKLLVYVIAIAVLAGMTEEQIERLTRRIEEIAERMLQKIEKAGEDAATILFLITTLRLLVKVIAIATLAGMTEEQIERLTQTIEKDAEEMLQKAKEAGEDARTIAFLLMTLKLLVEVIAIAIKAGMTEEQIKELLRKIKEIAERMLQKIEKAGEDESKVLQAAATLAKAVKEILEAI

SEQ ID NO: 2917 - protein, 256 aa, synthetic construct
  REGION 1..256: note = Synthetic
SKELEAIEEAIRAHIKKITEAIRKFKTTGDSFAATIADLLKKNLEELALQWAQIAFERKAKEAKTFEDLLRLIEQLIREIIQKITEARRRFKKTGDDKAAVEARMLELILEQLALIWAQIKFEKLAREAKTDEDVLRKIEELIKEIIQKIVEAERRYKKTGDDKAAVQARMLWLILYELALIWAQIKFDKLAKEAKTEEDVLRLIKELIKEIAEKFERAERKAEETGDDKAAVEAFMLFLILSQLETIATKIKTKR

SEQ ID NO: 2918 - protein, 204 aa, synthetic construct
  REGION 1..204: note = Synthetic
RESDRKKAEELLRSVKELAEKLGDEEVKRMVERAQRLLEAGDPRQLHRALAILEALHLLLVVAARAAKLGDEEVLRMIEEAKRLLQEGDPRQLERALKILKALLLLLEVREEAKKRGDEDVLRMLERAKRLLKSGDPRQLERALTILAALKLLLEVAEEAKKAGDERVLEELEKAKQLLAEGDPRKLKKAYTILVVLKHLLKLK

SEQ ID NO: 2919 - protein, 221 aa, synthetic construct
  REGION 1..221: note = Synthetic
KEELFWVVHALAFLALLLAVRLGDPRMATLVAELLEALKEAAENGDEDRLKKILAFALVLLHVALAQELAERLGDPKMKEQVEELLREIQKAQENGDESRLRFILKFAHVLYLVAVAQELAERLGDPKMKELVEQLYRQIQEAFENGDEDKLRKIVTFAQVLVLVIAAQELAERLGDPRMLEAVEKLLEKIKEAQANGDEKQLKEILTEAFRLVVAALQQQ

SEQ ID NO: 2920 - protein, 221 aa, synthetic construct
  REGION 1..221: note = Synthetic
SSELLNRASTLALKLLETAKRLGDERNLEMVKTLIKKVYEALASGDKEKLAKIIRLLEALLLALQLTEAAERLGDSKLKEMVRQLQEKVERAIRAGDKEQLKLILELLKALLAALRLVETARETGDSRNKKMVAALLRKVAEAIEKGDKEQLKLIMALLEALLAALALTKAAQETGDEENRRKVEELLKQLEEAIRKGDKEQLTKINFKLQLLLLRLYTSK

SEQ ID NO: 2921 - protein, 241 aa, synthetic construct
  REGION 1..241: note = Synthetic
SEEQLKLHATFVKFVAKYVKAKIKKALSEEFFREIARLLEKAERTAKAAAKEGDLTKANLAALLLAVLYAAVKVFEFIAKALSEEQFREIARLLKTALETAERALEEGDLKKVALALKLLEVLLLAVEVFAQIQKALSEEQFKKIERLLKAALKTAERALEEGDKTKLELALLLLEVLLLAVELFALIAKVLSEEQFEHIRTLLEVALKMAEHALKEGDESAARLAAFLLELLLSWVAAQV

SEQ ID NO: 2922 - protein, 248 aa, synthetic construct
  REGION 1..248: note = Synthetic
SAELHLVHIELLVAKLEEIAKDARGETLEQLKELIKKVQEALAEAQRAAEEGDPKKLKMINILLAIAYYVALLLKISQDARGETLETLKELIQRIWELLEKAERAYEEGDPRKLKMILILVQIAYYVALLLKISQDARGETLEKLKELIEEILRLLEEALRAYEEGDPRKLKMILILVQIAFYVAQLLKIAQKARGETLEQLEKLLKALWAALKAAAAAKEEGDPSKLKHILKMVASIYAYAKELEKK

SEQ ID NO: 2923 - protein, 228 aa, synthetic construct
  REGION 1..228: note = Synthetic
SEEQTDLKFELMLAKSWALEAILQLREMLDAGSDRERAARLIELLEKAIRIAEELLKRYAETGDEQLRRQLELVVKLLKAIAFAIQAIIELARMVQAGSDAERAKELIRLLEKAIEIALQLIEKYKETGDEELEEQLKLVVKLLQAIANAIRAIIELAKMVKAGSDSERAKDLIRKLLEAIRQLLELVERYRETGDSKLRQKLTELLLALLKTALEILEELHKAKKQQ

SEQ ID NO: 2924 - protein, 282 aa, synthetic construct
  REGION 1..282: note = Synthetic
QQELLEKAAKVLLKALLWVLQELLRTAEARGDPRAMKKALAVVLQVAREVIEKFAKAFGVSEEQLQQTILELFFRILLEALLQTLRKRLEEAKQRGDPRQMKAALEKVLQEAREEVEKFAKQFGVSEEQLQETILRLLFRILLEALLEILQARLEEAEARGDPRQMRRALEEVLQEAVKDIEKIARQFGVSEDQLQETILRLIFEILFLALLQILQKKLEEAKARGDPRQMDRALEEVLRTAKEEVKKIADQFGVSEEQLKTTITLLLLAIKLLATIHKTYN

SEQ ID NO: 2925 - protein, 282 aa, synthetic construct
  REGION 1..282: note = Synthetic
SESQLKEAFRLLLKKLLASLQEQLRRAEARGDPREMKRALERVLQEARRELEEFAKAFGVSEEQLQQTILELLFRILLEALLQILRARLEEAKKRGDPRAMKRALAAVLQEARELVEKLAKQFGVSEEQLKETILRLFTRILLEALLEILQKRLEEAEKRGDPRQMRAALEKVLKEARKEVEKFAKQFGVSEEKLKQTILNLIFRILLQALLQILRALLEEAKKRGDPRQMDAALEEVLRQAEEEVKKWAKAAGVSEAAARATAWLLKWRIAAEAKEEKKRK

SEQ ID NO: 2926 - protein, 282 aa, synthetic construct
  REGION 1..282: note = Synthetic
TESQLKNAYRLMLELLLKELQEQLRRAEARGDPRQMRAALEKVLQKARKTVEKFAKAFGVSEEQLQQTILELIFRILLEALLQILRARLEEAKARGDPRQMLRALEEVLQEAREDVEKFAKAFGVSEEQLQETILRLLYRILLEALLEILQKRLEEAEARGDPRQMRAALEKVLQEAREFVEKWAKQFGVSEEKLKQTIWNLFYRILLQALLQILRALLEEAKARGDPRQMERALEEVLRQAKEEVKKFAEQFGVSEADARAFAWLLTYRIAAEAKTEIKKK

SEQ ID NO: 2927 - protein, 238 aa, synthetic construct
  REGION 1..238: note = Synthetic
PQERRTTLELHLLLNIEFALRLVKAAGLSEQQAQEEAIKLALLAAVAWALKQLTELTERARTPQQFREVLLQVLLEAIRILLKAVKKAGLSEEMAYEAAILVALIIAIEWAQQRLAELTERARTPQQFRESLLQVLLEAIRILLEAVKRAGLSESMAHKAAIFLALNLALAWALRLLKKLTEKARTPQEQREALEEVLKQAIEILKRAFKRAGLSESAAKLAAKLVAKALKTYWKKQL

SEQ ID NO: 2928 - protein, 270 aa, synthetic construct
  REGION 1..270: note = Synthetic
SELLAKSLRELILRLLTSLLTEMIAKAKSEEDVKEAIRTALKAAKKLIEELVKRMGMSEQQSREDIKEIIFQLILRALTYLLTREIKKAKSEEDFKKAIRKALQLAKEMIEEAIKRMGMSEQQSREDIKRIIFELILTALTELLKDAIAKAKSEEDVKRAIRKALELAKQLFEEATKRMGMSEQQARDDIWAIIHNLIATALLLWLTKLIAKAKSEEDVERALETALRLAEQMIREAVKAMGMSEQQLRTAIATIKILLKWYAKFVLTVK

SEQ ID NO: 2929 - protein, 270 aa, synthetic construct
  REGION 1..270: note = Synthetic
REEEAWKIAVFIASEIWTKAVKQAKKAKSPEDFKRVLKRAIEEAKRQVEQSIKELGLSEDEMKKTIKWIIEEIILAVIATYAEQEATKAKSPEDFEQVLRRAFRLAKEIIEKSIKAMGLSEQELRELLKKIIKEIILTVIKTYAKQEAEKAKSPEDFERVIERALALAFRIVEKFIREMGLSEQEYRETLKEIFKEIILTVISTYAKQEAEKAKSPEDFLDVLQSAMNLAIKIVAKVIKKLGLSEEEAAKTLEEILKQIRRTVEEILKKQ

SEQ ID NO: 2930 - protein, 208 aa, synthetic construct
  REGION 1..208: note = Synthetic
SADHNAVMLTVFKLLLTAQALGDPETFRQIAELLERALELAKQGLASKAKEMLRVAALVLELLKLAAELGDPETKRQIEELIQRALELAKQGLARKAIAMLQVAVLVLRLLQKAKELGDPETERQIRELVQRALELAKQGLAEEAYAMLSVADAVLHLLILARDLGDPETYRQIAKLVQEALELAKQGLASEALEKLLKALFELHEKK

SEQ ID NO: 2931 - protein, 207 aa, synthetic construct
  REGION 1..207: note = Synthetic
DSQLLALLEFIMKVLERVLRAGDEHLVKKAVELLKRAAELAVRGDEDQMALLAVIAFILEVFLRVKEAGDEELTAIAQDLLAKADKLLAKGDREQMNLLAMVAFILEVFVRVKAAGDSRLTEIAKRLLEKAAKLLEKGDWEQMALLLWIAYILKVFLEVAKAGDSDLTAKAEKLLRRAEELLKRGDKEAMAKLAATAFKLAVTVTLQ

SEQ ID NO: 2932 - protein, 207 aa, synthetic construct
  REGION 1..207: note = Synthetic
DEKLLELYTFILKVAAFVRSAGDEDLTRKLEKLLKRARELLKRGDEDQMRLLFLIAKILEVFVRVKEAGDERLTKIAARLLKKADKLLAKGDMEQMTLLYLIAFILEVFTRVAAAGDSRLTEIAQRLLEKAEELLKKGDKDQMALLYFIAWILEVFLRVKKAGDSELTAKAEKLLKRAEELLKRGDKKQMFDLALKASELAVTAAYK

SEQ ID NO: 2933 - protein, 207 aa, synthetic construct
  REGION 1..207: note = Synthetic
SLSLLELVLFLREIYKEVVAAGDEEATRTAEELLRKAEKLTKEGDLEKLHMLAMVARLLEIFLRVEKAGDEEATRTAQELLEKAKELTEQGDRDALSMLVFVAQLLEIFLRVAKAGDEEATRTAQELLEKAKDLTEKGDVEKLFMLALVARLLAIFLYVREAGDEEATETAQRLLEKAKKLEEQGDLDKLFDLLLTAKKLYEEATKK

SEQ ID NO: 2934 - protein, 203 aa, synthetic construct
  REGION 1..203: note = Synthetic
TEHALAQLLAALLAVHQIYANTGDPRLLELYRRIKRELELLFAGKGDPREASKRARAVLLLLQALQMVLQIYKEVGDPRLLELFERILKELEALLAGKGDPREASERAAAVLLLLQALQMVLEIYKQTGDPRLLELFRRILALLELLLAGKGDPSEASKAASFVLQLLKLLKAVLETLKRTGDPKLEEFFDTLLKLLAKALQG

SEQ ID NO: 2935 - protein, 252 aa, synthetic construct
  REGION 1..252: note = Synthetic
REEEITKLFERIIELLKTLAKLAKKTGDSQVQEIAEQVLTLFERALEYLKNGDAEKVLRFLQSATLMAQLALLLYELAELYKKDGDSQVKTVYDQVRRLFKKAQEYEANGDFEKAYRFLQSALLMAELARLLKELKELWKKYGDEQVWEVWEQVQRLFEKALEYEANGDFEKSYTFLASAVHMAKIARLLFWLAELWKKKGDEKVWEIWEEVRRLFEKAQEAEKQGDYEKSAKALNLATLMALFAAAAAKVK

SEQ ID NO: 2936 - protein, 252 aa, synthetic construct
  REGION 1..252: note = Synthetic
TSEEILTLFKRILKLLAHLYKLWKKHGDEQVQKVAEQVWRLLERALEAMKSGDLEKAYRFLQVATLMAEIARLLKELKELWKKHGDESVWEVWERVRDLFEKAQEYEKQGDFEKSYRFLAAATHMAQIARLLHELKALWETYGDEDVWEIWEDVRKLFEKAQELEKQGDFEKSLLFLNSATLMALIARLLFKLAELWKKDGDERLWEVWEEVRRLFEEAQEYEKQGDFEASLAALLAAYLLALLALLERNLK

SEQ ID NO: 2937 - protein, 204 aa, synthetic construct
  REGION 1..204: note = Synthetic
SESLKSKLKKLVTLVLVHAKEAGDETAYQIAREAAEIAENQSSEQIKAAILKVELALLVLHVLTLARKAGDETAYRIAKQAIEIAKNQSEEQIKAAIAKVRLAVLVLEVLQMAKKQGDETAYQIAREAIEIAQNQSEEAIDEAIVRVELAALVLRVLDMARKAGDEEAYRIAEQAIEIAKTQSKEAILTAIARVAQAAVKLEMK

SEQ ID NO: 2938 - protein, 232 aa, synthetic construct
  REGION 1..232: note = Synthetic
SHELLLAIFASIIRIAEQAEEMRKRGDEELFRIFKRIYEILLRALESGDPRDLTYALTLAKIIEAIRRIREKAKEMKERGDEELYKIFKEIYERLKRATESGDPRDLEFALLVAAIIEALERIREKAKEMAERGDEELYKIFAEIYERLKRATKSGDPRELQYALLVAQIIEAIERIKKKAKEMKERGDEELARRFQEIYETLFRALESGDPKDLHYALAAAELVEKEEKKK

SEQ ID NO: 2939 - protein, 232 aa, synthetic construct
  REGION 1..232: note = Synthetic
TEEALSKIKELIHQIATIAELLRRRGDEELFRQFKALEEILERAAKSGDPRDLTYALLLAAIILLIYSIRKKAKEMKERGDEELYRIFKEIERRLKKAWKSGDPRDLKFAILVAQIVESIKRIAEKAKEMAERGDEELLRKFEEIEERLKRATKSGDPRELKFALLVAQIIEALERIRKKAKEMAERGDETMYEYFLEVYEKLKRATDSGDPRELQEALEAAETVEKLEKSL

SEQ ID NO: 2940 - protein, 233 aa, synthetic construct
  REGION 1..233: note = Synthetic
SWYELSELKALLLKLAAAAKLLAKQGDEEFMRLVEEIVRRAKEAIETGDPEKLAKALALVKLLLLLIELYELLEKLKAQGDEEEVRLVEEILRRAKKAIKTGDPSQLEAALHLVHLLILLIELKELLEKLKAQGDEDRARLVEEILRRAKKAIKTGDPSKLHLAQMLVYLLILLIELAELLKALKDQGDEDRAREVEEILRRALEAIQTGDPKQLFEAAAAVMALITLVEQAQ

SEQ ID NO: 2941 - protein, 243 aa, synthetic construct
  REGION 1..243: note = Synthetic
SDEESLAVTQAELLAARIELLAKQLLKQYGDPQAEEILRKAQEIVERLQKSDDKRELKILLAILEALWLFLQISLLAKQLQRQYGDPKAEEILQKAKEIVERLQKSDDERELRILLMILKALYLFLQISLLAAQLLRQYGDPAAEEILRKAEEILERLQKSDDESELKILLMILKALWLFLLISLLAHQLLEQYGDPKAEQILKQAKKIVEALLKSDDESKLELLLHQLEILVELLKIALKAK

SEQ ID NO: 2942 - protein, 233 aa, synthetic construct
  REGION 1..233: note = Synthetic
TEDALLALKLQLSYLKALLSELKKQGDSELVKLVEEILRRAEEALETGDPEKLAKALLLVELLLLLVELYELYQKLKAQGDEEFLKLVEEILRRAKEALKTGDPSQLKLAKLLVELLILLVELLELAEKLKAQGDEERAKLVEEIVRRAKKAIQTGDPEKLKKAKLLVELLILLIELKELAEKLKEQGDEDLAKSVEFVVKLAEKAIKTGDPSLLKAAKEAVAKHIETVEKKR

SEQ ID NO: 2943 - protein, 205 aa, synthetic construct
  REGION 1..205: note = Synthetic
REELLKKIYQLVAHIVAVAEYLGDEEIADRAKKILEEAQNVSPEQVARLLKLLEIFVQMVHILRLAKELGDEEIAKTAKEIVEKARHVSPEQVERLLLLLEIFLQMVQIKKKAKELGDEDTAKRAKEIVEEAKHVSPEQVKRLLELLAIFLQMVKILELARELGDESTAQKARRIVEKARNVSPEQVFKLLLALQYALALVQLKK

SEQ ID NO: 2944 - protein, 205 aa, synthetic construct
  REGION 1..205: note = Synthetic
REELLKKIYWLVALIVAAAEYLGDEEIAKRAKEILEEAQNVSPEQVARLLELLKIFLQMVHILKLAKELGDEEIARQAKEIVEKARNVSPEQVERLLLLLEIFLQMLQIVKLAKELGDEEIARRAKEIVKEARNVSPEQVKRLLTLLAIFLLMVKILKLARELGDEELAQKARRIVEKARNVSPEQVFALLLELAYAHQLVRFKK

SEQ ID NO: 2945 - protein, 224 aa, synthetic construct
  REGION 1..224: note = Synthetic
TEEVIKTLLHASDLAAKIAEIAKELGDSETVKTALDLLKELNEMAKRGDEKKLRLLTLLLQALLLALQIIKIAKKLGDEETIKKAKELQEEVKEMYKKGDEKKLRLLVTLLEALLLALQIIEIAAELGDSETIQKAKELKEEIEEMYERGDEKKLRLLTTLLKALLLALQIIKIAEKLGDSETIEEAKRTRDELEEAYKRGDEEKLKKLYAKLVSMLVELRIKE

SEQ ID NO: 2946 - protein, 224 aa, synthetic construct
  REGION 1..224: note = Synthetic
TEEAIKIFLHAVALAEKISRIAKKLGDSKTNAQAQKLLKELLEMVKRGDEKKLRLLTTLLQALLLALQIIEIAQKLGDSETIQKAKELKEEIFEMYKAGDEKKLRLLTILLEALLLALQIIEIAQKLGDSETIQRAKETQEEIEEMYERGDEKKLRLLTTLLKALLLALQIIELAEKLGDQETIEEAKRTQKKILEMYERGDEEKLKRLYAKLVAMLVQLAMNE

SEQ ID NO: 2947 - protein, 240 aa, synthetic construct
  REGION 1..240: note = Synthetic
REEKIKKVLSLLLAALHAAIEFYKATGDPTALEIIAELLKNWEQVKRATDPREIERLLEIAKVAYLLIAAMLLATRYYKKTGDPTAEQILRELSENLRQVQRATDPREIARLLLIAKVAYLLIQAMLLATEFYERTGDPTAEQISRELSANLAQVQRATDPREIERLYLIAKLAYALIHAMLAATEYYKKTGDPTAEEILRKLAALLRQVQRATDPREIEELVKRAEEAAFKINAAAAKA

SEQ ID NO: 2948 - protein, 224 aa, synthetic construct
  REGION 1..224: note = Synthetic
SEEAFRLVLEILRIAQELLEQVLEAGDSETYKKALEIAEKALEAAKSGDKSTLELMLLVLQILQIFIELRKKAAEAGDMRTLKQAKEIAEDAQKAAEKGDLRTLKLMLIVLQILKIFIELLEQIEKAGDSETKEKAKKIAEKAYEAAKKGDYKTLLLMWLVLHILKNFIELRQLVEELGDSDTKREAERIAEKAQQAADKGDLDTLLKMQKRLTELKLEIKAKK

SEQ ID NO: 2949 - protein, 201 aa, synthetic construct
  REGION 1..201: note = Synthetic
SEELKELWRLNLEISEAAQRQGNEEILKLVAKATEAYARGDLEKLKKLLELARLALLIYEIAAQAKKAGNEWIKELVRQAQEMLRRGDLEKLAKLLRLAELALLIYKIAEWAKRAGNEEIKELVRQAQEMLRRGDLEKLEKLLQLAHLALAIYEIEEEAKRQGNEEILELVKAAKEMLRRGDLLKLAYLLQLAALALRQQQ

SEQ ID NO: 2950 - protein, 223 aa, synthetic construct
  REGION 1..223: note = Synthetic
SAEEFKFLLAILEALKAAEELGDEELYRQLKAMEERFKKAAENGQEEELERLKEQVKFLLLIAEALAYAKQLGDEELKKLLKEMLKQFKRAQENGQEEEVRRLLEYVAFLLAIAQALWYAKALGDEKLYKLLLEMLEKFKEAAANGQDEEIKTLLNQITFLLAIAEALWYAEQLGDKDLKKRLQEMLEAFKRARENGQEEKLEELQRRVAKLLVEARDKRKKK

SEQ ID NO: 2951 - protein, 223 aa, synthetic construct
  REGION 1..223: note = Synthetic
SVEEEFFRFAISAALKAAKRLGDELLYRLLKEMEERFQKAQENGQDEELKRLMEQLKFLVAIASALALAKELGDELLLRLLKEMLKQFKRAQENGQDEEVRRLAEQVEFLHIIAAALWAAKKLGDEELWRQLQEMLEKFKEAQENGQDEEVRRLVEQVKFLLYIAKALYYAEQLGDEDLKRVLKAFLRAFKSARENGQDEKVRTLTEMVKFLLAIAESLRRQK

SEQ ID NO: 2952 - protein, 252 aa, synthetic construct
  REGION 1..252: note = Synthetic
STHSKFNFTFAKKVAEEIEKKAAEDGDPDLLKLAKEIKEQLRELEEKEAAGNSEEVQEALKSLSMIAMALLLAIDIYRKALELGDPELLRLAKKIIEQLVRLLEKEKAGNKEEVEEALKSLLMIAEAILLAIAIYEKAQELGDPELERAAKKILEQLSRLLEKLAAGNKEEVEEALKSLLMIARALLLAIEILEKAEELGDPFLKKLARMILEILSRLLEKQKAGNKEEVEEALANLLKLAEFLLKQIKKKK

SEQ ID NO: 2953 - protein, 228 aa, synthetic construct
  REGION 1..228: note = Synthetic
TEHDQKTIADQLVKLLLALHEAKKQGNELAEILKQAYEEATRALESGDPRQIRYAQLLVELAILVFKLKQLMAEAAKQGNEVWEILKQALEEAKRAFESGDPREIKTAIARVEIAILLFKLEQLMREAKKQGNEVYEILKQALEDAKRAFKSGDPREIARAILKVEIAILLFKLEQLMREASKQGNEVWEILREALEEAKRAFKSGDPSEIFRAIIRVKVAIAIFERI

SEQ ID NO: 2954 - protein, 228 aa, synthetic construct
  REGION 1..228: note = Synthetic
SEELRLQIKANAWLLRLLMKTAKKQGNDVYEILKQALEQAKRAIESGDPRQIKKAILLVEIAQLVFKLLQLMREAAKQGNEVYEILKQALEEAKRAFKSGDPREIKKAILLVEIALLLFKLEKLMREAAKQGNEVYEILKQALEDAKRAFKSGDPREIKRAILRVEIAILLFKLEQLMREAKKQGNEVKDVLADATKLAKKAFKKGDPKDIWVAIQVVKQAIREFEER

SEQ ID NO: 2955 - protein, 233 aa, synthetic construct
  REGION 1..233: note = Synthetic
REEELTEIAVLVWQLEQIAKALKKKGDEELARLVEELVEQFKRILEEGDPRQLKRIKKLAEIVILAVELRDIAKKLKEEGDEELARLFEELAEQLYKIIKEGDPRQLERIKTLAEIIILAAKLRDIAKELKKEGDEELARLFEELVEQLFKIIREGDPRQLERIKKLAEILILAAQLSKIAKELKEEGDETLAKAVEELMEQLYRIIKEGDPRQLKYIATLAKWVIANVEKRK

SEQ ID NO: 2956 - protein, 240 aa, synthetic construct
  REGION 1..240: note = Synthetic
SWEIFKLHQEAQELIEKVKKSADAAGDPGAKEMAKEVNRKLLEALKSGDEDKIRKVAKIVILILQALKLILEVIRTAKKAGDPGAIEMAQEVLRQLKKALESGDESKIEKKAKIVLLILEALKIILEVIRLAKEAGDPGAIEMAKELLRQLKKALASGDDDKIEKTAKRVIMILAALLAILKVIKSAKKAGDPGAIKQAKRLLKELKAALESGDESKIEKAAFEVSVALAELYHKLEAKR

SEQ ID NO: 2957 - protein, 258 aa, synthetic construct
  REGION 1..258: note = Synthetic
SEEMLYALSAALHLLLEAYAAAVQLLEKKGDPTAEAILRQIKELLEQLKRAFKAGDEDKLRMALLLATALYYLVLAFLLAKALLDETGDPTAEEILEQIKKTSEKLWRAFRAGDEYKLLMAAALARALYYLVQAFLLAKRLLKEFGDPQAEEILQQIRELLEQIFRAFDAGDLDKLLMAAHLATALYALVYAFLLAKQLLARTGDPKAEEFLEEIRRTSEALIRAFRAGDWEKLVKLQLKALLLARQIELELEKKTRK

SEQ ID NO: 2958 - protein, 248 aa, synthetic construct
  REGION 1..248: note = Synthetic
TEQLITNVELLIELADLLAKAIRRKDEDLYARLAELLRQVKEALARARKKGDPKDIKTVYLIAAVISTIAEAIKLVLEIANKDEDLYKRLKELIEQVLERLQEAIERGDPRKIATVLLIAQVISTIAKAIKLVLEIANKDEDLYKKLKALIEQVLERLQEAIERGDPKDIHTVLLIAQVISTIAKAIKLALEIANKDEDAWQRLKEQIDSVLKQLQEAIERGDPRAIRNVLTQAKIIAKIAQAIKEVK

SEQ ID NO: 2959 - protein, 248 aa, synthetic construct
  REGION 1..248: note = Synthetic
TEQAIELLKLLIEVARLLVEALARKDEELYARLAELIKQVEERFKEARARGDPKDIATVYLIAAVISTIAKAIKLVLEIANKDEDLYARLKALIEQVLEKLQEAIEKGDPKDIATVLLIAQVISTIAKAIKLALEIANKDEELYKKLKALIEQVLERLQEAIEEGDPRKIHTVLLIAQVISTIAKAIKLALEIANKDEDAYKRLKEQIESVLRQLQEAIERGDPRAIRSVLTQAKLISTYAQLLKEYR

SEQ ID NO: 2960 - protein, 248 aa, synthetic construct
  REGION 1..248: note = Synthetic
TEQEIELVKLLIEVAEVAVEAIARKDEDLWKRLVELIKQVKERLKEARKKGDPADIKTVYLIAAVISTIATAIKLVLAIKDKDEDLFARLKELIEQVLERLQEAIERGDPRKIATVLLIAQVISTIAKAIHLVLEIKDKDEDLYKKLRELIKQVLERLQEAIEEGDPSKIHTVLLIAQVISTIAKAIKLALEIASKDESAWQKLIEQIDSVLKQLQEAIERGDPDAIRSVLTQAKLIATLAQLIKETK

SEQ ID NO: 2961 - protein, 248 aa, synthetic construct
  REGION 1..248: note = Synthetic
TEELIEKVKLTITLAEILAALIANKDEDLWKKLAELLRQVNERLEEARKRGDPSKIATVLLIAKVIAAIASAIAFALAIANKDEDLYARLKELIEQVLDKLQEAIEKGDPRDIATVFLIALVISTIAEAIELALEIANKDEDLWQKLYELILQVLERLQEAIERGDPEKIKTVLLIAELIATIAKAIKLALEIRKKDEKAAKALKKAIEEVLRQLQEAIERGDPRKIKEVLDFAREIEHWARAFDRLR

SEQ ID NO: 2962 - protein, 248 aa, synthetic construct
  REGION 1..248: note = Synthetic
TEELIQKVFKTILEAERLAEELASKDEDLYKRLAELLTAVVELLLEAIKEGDPRKIATVLLIAQVISTIAKAIDLVLEIANKDEELYKTLKKLLEQVLERLKEAIERGDPSEIATVLLIAQVISTIAEAIKLVLEIANKDEELYKTLKELIKQVLERLQEAIERGDPRKIATVHQIAFVIVVIARAIKLLLAIANKDESQWQKLKEKIEEVLRQLQEAIERGDPRKISEVIVKAILIYLEAVAIAKRL

SEQ ID NO: 2963 - protein, 251 aa, synthetic construct
  REGION 1..251: note = Synthetic
SEELAKLFLTAKHAYANLVVIAIKTGSEEARKVIQVARELLEKAAELRKTGDYEKIKKLVELIELFARALEALARLEEIYKETGSEEARQVVEVAQELLRRALDLQSTGDTEEIKKLVKLIELFARALEMLKRLEEIYKRTGSEEAEKLIKYLQALLRRALELARTGDLDTIWFLVLLIEHFATALELLERLAEIYKQTGSEEAERVLKQAYELLRQALELAKTGDIEKIVELVLEIMIAAAELEATATKQ

SEQ ID NO: 2964 - protein, 221 aa, synthetic construct
  REGION 1..221: note = Synthetic
STEKLVELFRTALEALRLAKELGDPQILTQVYESLLQAITAARQGDEEKMEKYLRLIQLILLALEAARLAKELGDPETFRQIFRSIQKAIEAFKQGDSEKMEAYLRLIWLIYAALEAARLAKELGDPDVYAQVKRSLKKAIEAFKQGDEEKMKKYLQLILLILAALEAARLAKELGDPDTYKRIKDSVAKAIEAFKQGDDEKMHEYAYEIFLIALKLFYRK

SEQ ID NO: 2965 - protein, 248 aa, synthetic construct
  REGION 1..248: note = Synthetic
TAELSVKVFETILEAVKLAEEIANKDEELYKRLAELLAAVFEALLEAWKKGDPRDIATVLLIAQVISTIARAIEAVLQIANKDEELYKRLKELIKQVLERLKEAIERGDPSEIATVLLIAQVILTIAKAIKAALAIANKDEDLWKKLKELIKKVLERLQEAIEEGDPRKIATVLLIAFVIYVIARAIEKALDIASKDEDAWQKLKEKIEEVLRQLEEAIERGDPRKIYAVANTAIIIYLEAVAIEKRL

SEQ ID NO: 2966 - protein, 248 aa, synthetic construct
  REGION 1..248: note = Synthetic
TEELIQKVFQTILEALRLVEELASKDEELYQRLAELIAAVLELLLEAIKKGDPSDIKTVLLIAQVISTIAKAIFLVKEIANKDEELYARLKALIEQILERLQEAIERGDPSKIATVLLIAQVISTIAEAIKLVLEIANKDEDLWRKLKELLKQVLERLQEAIERGDPAKIATVYQIAVVISIIARAIKAALEIAKKDKDQWQELKEKIEEVLRQLQEAIERGDPRKITAVAVKAILIYLEAVAAAKRL

SEQ ID NO: 2967 - protein, 248 aa, synthetic construct
  REGION 1..248: note = Synthetic
TEELIQKVFQTILEAVRLAEEIANKDEDLYKRLAELLTAVFEALLEALKAGDPNKIATVLLIAQVISTIAAAIKLVLEIANKDEELYARLKALIEQVLERLKEAIERGDPSKIETVLLIAQVISTIAEAIKLALEIKDKDEDLWAKLKELIKQVLERLQEAIEKGDPRDIATVLQIAVVISIIARAIKAALEIARKDESQWQELKEKIDEVLKQLQEAIERGDPRKITAVAVKAIKIYLEALAVAKRL

SEQ ID NO: 2968 - protein, 248 aa, synthetic construct
  REGION 1..248: note = Synthetic
TEYLITVVEVTITLAASMAEAISNKDEDLWQRLAELIEQVKERLKEARKKGDPRDIKTVLLIAQVILTIAKAIWLVLALANKDEDLHKRLKKLIEQVLEALQEAIEKGDPRDIATVLLIAQVISTIAKAIDLALAIANKDEDLFKKLKELLKQVLERLQEAIERGDPREIFTVLLIAYVIASIAKAIHLALEIANKDESQYQELKEKIEEVLDQLQEAIERGDPRKIAEVMANANRISLEAEAIKERI

SEQ ID NO: 2969 - protein, 248 aa, synthetic construct
  REGION 1..248: note = Synthetic
TQDLQIKVSLTIATAFELVEEIADKDEDLYARLAALLRQVKERLEEAQRRGDPAKIATVLLIAQVISTIAKAIKLVLEIANKDEDLFKRLKELIEQVLELLQEAIERGDPRKIETVLLIAQVISAIAKAIKLALEIANKDEELFKKLKELLKQVLERLQEAIERGDPKDIATVLLIAAVISTIAKAIKLVLEIANKDSRQWQELKEKIEEVLRQLQEAIERGDPRKIQEVYEKALRISKEAAEIKKKI

SEQ ID NO: 2970 - protein, 248 aa, synthetic construct
  REGION 1..248: note = Synthetic
TEADLIKVWLTIAEASRLVQEIAEKDEELYERLAALIRQVEEKLKEAKKKGDPKDIATVLLIAQVISTIAKAIKLALEIANKDEDLYKKLHELIKQVLEKLQEAIEKGDPRDIKTVLLIAEVISAIAKAIKLVLEIANKDEELFKKLKELIKQVLDRLQEAIERGDPSAIATVLLIAYVISTIAKAIHLALEIANKDESQWQKLKEKIEEVLRQLQEAIERGDPEKIAEVQEKAQRISEEAAEIKKKL

SEQ ID NO: 2971 - protein, 214 aa, synthetic construct
  REGION 1..214: note = Synthetic
SQETFYKLAELILQVQELAQKVEDEEFAKKLSELAMELMKRLFEVWLLGVPPRKLEEISTIAYVASLIAEVFLLARQVEDEEFMKKLLELARELLERLYQVVKLGVPPEALEYISTIATVASAIATVFLLARQVEDEEFMKKLLELARRLLEKLYQTVKLGVPPEELKKILAAAAFAYFIAASFLIALKVEDKDNAEKQLQLAREALEWLRKAV

SEQ ID NO: 2972 - protein, 214 aa, synthetic construct
  REGION 1..214: note = Synthetic
SEELERTLAKAKELLKRALFAASQAGDETALESILTTLEEMKKARTPEQFEKFLTLAKALLLLAKAYYAAKLAGDEKATESVKKTLKEMQKARTPEQFKKFLTLAKALLLLAWAYHAAKQAGDSKATESVKKTLEAMQNARTPEQFEKFLTLAKALAFLALAYLAAAKAGDEEATRQVQRTLEDMDKARTPEQFEEFLRRAKALAEKALKSATK

SEQ ID NO: 2973 - protein, 244 aa, synthetic construct
  REGION 1..244: note = Synthetic
SAELTLMFMTAKVALKLLAEHSKRGDSLAKEVFETVRKLIEAAERYAAQGDEETAKKLLELAILLARAVHALAHLAKLSSQGDELAKEVYELVKKLIEAALRYTRKGDLETAKKLLTLAIMLARAVAYLKRLAELAKQGDSLAKEVFEVVKKLIERAIKYTEQGDLEAAAFLLALAILLARAVQYLRELEELRKQGDSYAEEIFKQVEDLIKKAIEYTRQGDLEAAYRALLWAIILAELVRSTK

SEQ ID NO: 2974 - protein, 244 aa, synthetic construct
  REGION 1..244: note = Synthetic
SAELDLMFMHAKSLLKALETLSRNGDEVAKQVYETVRQLIEKAEQYKAHGDEETAKKLLELAIMLARAVLYLEELAKLSSQGDSLAAEVYELVKKLIEAAIRYTRKGDLERAKKLLTLAILLARAVAYLKRLAELSKQGDSLAKAVFETVKKLIERAIKYTEQGDLEAALFLLHLAILLARAVQYLRELEELRKQGDSRAEEVFKQVEKLIKKAIEYTRQGDLEAAYAALSWAIILAELVRRQR

SEQ ID NO: 2975 - protein, 251 aa, synthetic construct
  REGION 1..251: note = Synthetic
SEELTKLFTRALSMAFQLYKIYKNTGSEEARAVIKVALELLATATALLRTGDYEKIKKLVELIELFARALEMLLRLEEIYKETGSEEARQLIEIARELLRRALQLARTGDFEEIKKLVKLIELFAEALELLKELEEIVKRIGSEEAEKVIKFLQALLRRAVELARTGDTEAIEKLVALIKYFAHALFALELLEEIYKQTGSEEAERVIKKAQELLRQALELAKTGDYEKIVKLVLKILEAAIKLSVKRTRK

SEQ ID NO: 2976 - protein, 244 aa, synthetic construct
  REGION 1..244: note = Synthetic
SAELDLMFMQAKVALKALAEHSKRGDSLAKEVFETVRKLIEAAERYKAQGDEETAKKLLELAIMLARAVHALAQLAKLSKQGDEVAQEVYETVKKLIEAALRYTRKGDLETAKKLLTLAIMLARAVAYLKRLAELSKQGDELAKEVFEVVKKLIEKAIEYTEQGDLEAALFLLYLAILLARAVQYLRELEELRKQGDSRAEEVFKAVEKLIKKAIEYTRQGDLEAAYAALLEAIKLAELVRSTK

SEQ ID NO: 2977 - protein, 244 aa, synthetic construct
  REGION 1..244: note = Synthetic
SAELTLMFMHAKVLLAALEWLSRKGDEVAKQVFETVRALIEAAERYAAQGDEETAKKLLELAILLARAVFALAKLAKLSQQGDEVAQEVFETVKKLIEAAIRYTRQGDLETAKKLLTLAIMLARAVAYLKRLAELSKQGDSVAAEVYETVKKLIEKAIRYTEQGDLEAAAFLLHLAILLARAVQYLRALEELRKQGDSLAEEIFKQVEALIKKAIEATRQGDLEKAYYALSWAILLAELVRTTK

SEQ ID NO: 2978 - protein, 244 aa, synthetic construct
  REGION 1..244: note = Synthetic
SWELEFMFMEAKVALKALAEHAKEGDSLAKEVFETVRKLIEAAERYAAQGDEEEAKKLLELAILLARAVHALANLEKLSRQGDSLAKEVFELVKKLIEAALRYTRKGDLETAKKLLTLAIMLARAVAYLKRLAELAKQGDSLAKEVYETVKKLIEKAIRYTEQGDLETAMKLLWLAILLARAVQYLRELEALRKQGDSRAEEVFKKVEKLIKKAIEYTKHGDLETALALLMWAILLAEEVRSKK

SEQ ID NO: 2979 - protein, 244 aa, synthetic construct
  REGION 1..244: note = Synthetic
SSELDIAYELALMALALLAEMSANGDELAKQVYETVRQLIEKAERYKANGDEEEAKKLLKLAAMLAEAVLALATLAELSKRGDEVASEVYETVKKLIEKALAYTRKGDLETAAKLLKLALMLATAVKALARLAELSKQGDELAKEVYELVKKLIERAIRYTEQGDLETAAKLLRLAIMLARAVQYLRALAELRKQGDSQAARVFEFVEKLIKWAIEATKQGDIESALAALTEAIKLAETVLRQK

SEQ ID NO: 2980 - protein, 244 aa, synthetic construct
  REGION 1..244: note = Synthetic
SAHLESAFEQAKMALALLAEMSANGDSLAKQVYETVRQLIERAERYAANGDEEEAYKLLELAALLVKAVLALAALAELAKRGDSLAKEVFETVKKLIEKALAYTRKGDLETAKKLLRLALMLATAVKLLARLAELAKQGDELAKEVFELVKKLIEKAIRATEQGDLEKAEKLLRLAIMLARAVQYLRELEELRKQGDSLAARVFEFVERHIKKAIEATRQGDLEYALAALAHAIKLAQWVRELK

SEQ ID NO: 2981 - protein, 244 aa, synthetic construct
  REGION 1..244: note = Synthetic
SAQLESAFEQAKMALALLEEMSRNGDELAKQVYETVRQLIERAERYKAKGDEETAKKLLELAVMLAEAVLALATLAELSKQGDEVASEVYETVKKLIEKALRYTRQGDLETAKKLLALALMLATAVKALKRLAELAKQGDSLAKEVYELVKKLIERAIRYTEQGDLETAAKLLRLAIMLARAVQYLRALEELRKQGDSQAARVFEFVEKLIKKAIEATRQGDLEYAAHALANAIKLAETVLKQK

SEQ ID NO: 2982 - protein, 244 aa, synthetic construct
  REGION 1..244: note = Synthetic
SAQLEVAEEQAKMALKLLESMSRNGDEVAKQVYELVRELIEKAEAYKARGDEETAKKLLELAAMLAEAVLALATLAELSKQGDEVAKEVYETVKKLIEKAIKYTRKGDLETAAKLLRLAAMLATAVKALKRLEELSRQGDELAKEVYELVKKLIEKAIEYTEQGDLEAAEKLLRLAIMLARAVQYLRALAELRKQGDEQAAMVFEFVERLIKKAIEATRQGDLEYAAHALENAIKLAETVLAQK

SEQ ID NO: 2983 - protein, 221 aa, synthetic construct
  REGION 1..221: note = Synthetic
FEEALKTAETLVEEAFKTAMELGDKDLNEMANKVLKQLEEIRRNGDEDAIRFLLLVAQALTAVVRATKTAAELGDEELLRMAKFVLKQLKEIVEKGDERKIRFLLLVAQALLLVVEATKRAAELGDSELLEMAKRVLKQLKSIVARGDEDAIKFLLAVAQALVAVVLATAAARKLGDERLLAKAKEVLKKLKEIVEAGDEKRIKELLSEARALAWEISEAI

SEQ ID NO: 2984 - protein, 221 aa, synthetic construct
  REGION 1..221: note = Synthetic
SLEAFLKALATILKIAKLAKELGDEDSLKQASRLSKELLEVAERGDPDKLKLILLFLQALYYIILIIKLAQELGDSRAEEQAKRLAEELKEALKRGDPDKLALILLFLQAMYYIILIIKLAQELGDSRALEQAERLQEELQEVYERGDPDKLKFILTFVAAMYYIILIIKLAQELGDEKSEREAKERQEKLERVYREGDPDRLATILRKVVATALQIKMHK

SEQ ID NO: 2985 - protein, 221 aa, synthetic construct
  REGION 1..221: note = Synthetic
SEQLFLKALHYIYAILTDAEALGDSSSSEQAKRLLEELEEVARRGDPDKLKLILTFVQAMYYIILIIKIAQELGDSRTVEQAERLLEELKEVYKRGDPDKLALILHFVQAMYYIILIIKLARELGDSRALEQAERLQKELQEVYERGDPKKLHFILVFVAAMYYILAIIKLARELGDESSEREAYEDQEKLERVYKAGDPIKLAKILATVQLKAEQIARRK

SEQ ID NO: 2986 - protein, 237 aa, synthetic construct
  REGION 1..237: note = Synthetic
TVETIATAFDEALKLYELALELGDPVLLKLAKRMLEELTRAAKAGDLEQLTRTAEKVIRIVQALLTLAKLYKIAEEMGDPALLESAKRMIKELFELLEAGDEEQFLRTAEWVKRIAAALLAAAKLYKAAEEMGDPKLLESAKRMIETLYRNLAAGDKEQLLKEAEKVLSIVFALLAAAKLYKLAEELGDPRLLRTAEEMIEKLYRNLQAGDERKLNATAIAVALTVLTELTKAAKQK

SEQ ID NO: 2987 - protein, 167 aa, synthetic construct
  REGION 1..167: note = Synthetic
DEEIEKKIRSAQTQAKLAITLLERRGDQELLQKLKQMLRELEAAHGDERIEIILKIIHAIVAAADAILELKERGDQQLLRKLQEMTRELERAHGDERLEIIIRIIEALVKAAEAITALRERGDQEILRELLRMLEELERAHGDERIEKILEAIHQAVELAKLAAKVK

SEQ ID NO: 2988 - protein, 167 aa, synthetic construct
  REGION 1..167: note = Synthetic
SEETEKKIRNAQAQAKLAITLLEKRGDQEILQKLKKMTEELEKAHGDERIEIILKIIHALVRAAKAITDLKERGDQSLLRLLLRMLEELERAHGDERLEIILRIIKAVVKAAEAILKLRERGDQELLRELQRMTEELERAHGDERIEKILQAIHNAVAYAELAAKVK

SEQ ID NO: 2989 - protein, 227 aa, synthetic construct
  REGION 1..227: note = Synthetic
SEEEKWEISKALLALAAAATLLKQAGDEELIRLLQEIARRLKEAEKRGDPRKIKLLIEIAKAFVLLVRAILELKKAGDEELIRFLEKILAKLLEALRNGDPRQIKTLIKIAKAVVLLVKAILDLKKAGDEELIATLERILEKLERALKEGDPKQITLILLIAEAVVKLVKAILELKKAGDEELIKELEKIMEKLQRALEKGDPRDILKILHEALNAVAKVEATLKRK

SEQ ID NO: 2990 - protein, 227 aa, synthetic construct
  REGION 1..227: note = Synthetic
SVKLQLEIMRALKLLYEALAELAKAGDEELLRTLEEILRRLEEAWRRGDPRLIKTLVEIAEAFVELVRAILELKRAGDEELLKLLFKIMEKLLEALRRGDPRQIQQIILIAKAVVRLVKAILELKKAGDEELIATLERIMEALERALERGDPRQIEAIILIAFAVVELVKAILELKRAGDEELIRELEKIMEKLQRALENGDPRQISEIVWQALEFVLKVNLAAKKK

SEQ ID NO: 2991 - protein, 224 aa, synthetic construct
  REGION 1..224: note = Synthetic
SEELESLFKFIEKLLTSAEKNAKAAGNEAFLQVIREAKEELERALKAGDPRKIALVFDFAIIVQMLLLAYLTAKKLGNEEFLKSIKSALELLRQALKAGDPRQIALVYLFAEILLLLLKAYKLAKELGNEEFLAIIKAALEQLRRALEEGDPSQIKLVYLFAKILLLLLAAYKLAKEAGNEEAKEEIRKALKKLREALEAGDPRELKKVYAEALSRLANLAFEL

SEQ ID NO: 2992 - protein, 249 aa, synthetic construct
  REGION 1..249: note = Synthetic
SEEELKTDAMKVHLLILRALQLATKAGDEELVRLAERAQEFLEQALENAKKNYEEAKKQIELVYLFAAVVKLIAEALKLAQKAGDEDLERLAKWAAEFLEQALENSRKNAEAAAKQIKLVYKFAAVVYLIALALKEAQKAGDEDLLRLAKKAAEFLKRALENSSKNDREAFKQIELVYLFAWVVYSIAEALKLAQAAGDEQLVREAKKAAKQLERALENSKKNFEKAFKQILKVAAKAHKVALEALKQL

SEQ ID NO: 2993 - protein, 249 aa, synthetic construct
  REGION 1..249: note = Synthetic
KEEELKQLFKLVEIAIKLAHNTARAAGDEKLLKIAERLEEFLKRALENASKNDEEAKKQIELVYLFATVVALIAEALKLAQKAGDEDLERLAKTAAEFLEQALENSRKNFEAALKQIKLVYKFAEVVYLIALALKEAQKAGDETLVRIAKKAAEFLKRALENSSKNEEAAFRQIELVKLFASVVYLIAVALKEAQKAGDEKLVREAKKLAEQLKRALEAASKNEEKAFRAIAYVYLLAKLVASEAKAQK

SEQ ID NO: 2994 - protein, 249 aa, synthetic construct
  REGION 1..249: note = Synthetic
DEKELTLKAMLVWVAISKALELAEKAGDEKLVRIAERAAEFLKEALKNASKNKEKAKKQIDLVYEFALVVYLIARALKLAQKAGDEQLERIAKKAAEFLEQALENASKNDEEAKKQIDLVKLFAEVVYQIAEALKEAQKAGDEQLVRLAKKAAEYLKRALEAASKNDKEAWAAIVFVYFFAHVVAMIAKALKLAKKAGDEQLVREAKKAAEQLERALANLSKNDEKAYKQLWEVAEKAAAVYRKAKAQV

SEQ ID NO: 2995 - protein, 249 aa, synthetic construct
  REGION 1..249: note = Synthetic
SELELYFMASFVKSLIERAKKIAEKAGDEKLVRIAEAAEEFLTQALANASKNEEEAKEQIELVYMFAAVVYAIAEALKLAQKAGDEELLRLAKKLLEFLEQALENSRKNREQAKKQIKLVALFAYVVAAIAKALKEAQKAGDEKLVRLAKALAKYLKAALENASKNDREADWQIKLVVLFATVVALIAKALKLAQKAGDEQLVKEAKKAAEQLKRALENSSKNKEKAAKQILKVYEKAERVYREARAQL

SEQ ID NO: 2996 - protein, 249 aa, synthetic construct
  REGION 1..249: note = Synthetic
SDLELLFMASFVKTLIERAKKLAEKAGDEKLVKIAERLEEFLTEALANASKNEEEAKKQIELVYLFAAVVYAIAEALKLAQKAGDEELERLAKKAAEFLEQALENARKNQEQAKKQIKLVYLFAYVVAAIAKALKEAQKAGDEELVRLAKAAAKFLARALDNSSKNDEEAFWQIALVLLFATVVALIAKALKLAQKAGDEQLVKEAKKAAEQLKRALENSSKNKEKAAKQIVKVAEKAERVYREARAQL

SEQ ID NO: 2997 - protein, 237 aa, synthetic construct
  REGION 1..237: note = Synthetic
DTEDIATAFLEALKLYELALKLGDPKLLEVAKAMLEALLRAAKAGDEEQLKRTAAKVRRIVQALLTAAELLFLAEELGDPALLEVAKRMIKELFENWAAGDEEQLLRTAEEVKRILAALLAAAKLYKLAEELGDPKLLELAKRMIEKLFRNLAAGDIEALLKLASKVLSIVYALLAAAKLYKLALELGDPDLLRKAEEMIEKLYRNAAAGDEEKLNKTALAVALTVLLELTKAAKRK

SEQ ID NO: 2998 - protein, 249 aa, synthetic construct
  REGION 1..249: note = Synthetic
SELELYFMASFVKKLIEEAKKIAEKAGDEELVRLAERLEEFLEEALANASKNSEEAKKQIELVYMFASVVYAIAKALKLAQKAGDEELERLAKWAAEFLKQALENARKNQEAAKKQIKLVAEFAYVVAAIAEALKEAQKAGDETLVRIAKAAAKFLKAALENSSKNDREAFWQIALVVLFATVVALIAKALKLAQAAGDEQLVKEAKKAAEQLKRALENSSKNKEKAAKQIVKVVEKAERVYKEAAAQL

SEQ ID NO: 2999 - protein, 221 aa, synthetic construct
  REGION 1..221: note = Synthetic
SEELALKVWKYILEIIAKYKKTGDEEMQRQLEQLKRALEEAQRKGDPRDLHAALLQAQVVKIILEIIEAYKRTGDEEMQRQLEELQKQLEEARKTGDPRKLRAALLQAQVVKVILEIIQAYKETGDEEMQRQLEKLQKQLEEARKTGDPKKLFAALLQALIVKFILDIIRLYKETGDEEMQRQLEELLKRLEEAQRTGDPQALINALAAAQLIAEDLKTRK

SEQ ID NO: 3000 - protein, 220 aa, synthetic construct
  REGION 1..220: note = Synthetic
QEEEIRQAQIALALLIATAARMGNEEVLETAKQLAEKLERAIKMGDPQKLREVAEIIHAMLLVLALIEEAARLGNEEVLETAKQLQEKLLRAIQMGDPDKLREVAEILKAMLTVLRLIETAAKMGNEEVLETAKQLLEKLLRAIQMGDPQKLREVAEILEAMLTVLRLIETAAQQGNELALETAKRLQQKLLEAIQMGDPDKLKEVAELLKLWLANLETF

SEQ ID NO: 3001 - protein, 224 aa, synthetic construct
  REGION 1..224: note = Synthetic
TEEILELVFLLLFLVQEALEIAERLGDEEAYKMLLKIMEIIAKILKTGDLKKAKILYLVIEAALLVLRFLKTARELGDEDALRMLAKIKAAIKRILDAGDEKKAKIVALVIRAAVAVLHALKLARELGDEEALKFLKEILERIEEILERGDEKAALIVALVILAAQVVLNLLKLARELGDEDALRELKQILRQIAEILRRGDLSQAVRVLAQIIEALARLYKKK

SEQ ID NO: 3002 - protein, 224 aa, synthetic construct
  REGION 1..224: note = Synthetic
SEKVETLVLKAADAVAEALELAKKLGDSRADKMLKKILKRINEIWKKGDLYAAKIVYLVIAAALIVLKALKLARELGDERALKMLQKILKRIEEILERGDLKKAKIVYLVILAALLVLQALKLARELGDEWALKFLQEILKYIAEILDRGDLEKAEILYLVIAALLRVLKALKAARELGDEEALRRLKKILEKIKEILERGDKEQATRVAFEISQEVARLAAKK

SEQ ID NO: 3003 - protein, 224 aa, synthetic construct
  REGION 1..224: note = Synthetic
KEELKTAVALAKATVENALSLAKKQGDERALKLLEEIKRRIEEIERRGDLKKAKIVELVIKAALAVLEALKAARELGDEDALRFLQKILETIAEILRRGDEEKAKILYLVIAAAALVLKALKLAYELGDEEALRMLKAILKRIEEILERGDLKKAKILYLLVEAALLVLQALKLARELGDESALRQLKEILKEIKEIFDRGDLKKAKYVLENIKSALTALAVQK

SEQ ID NO: 3004 - protein, 224 aa, synthetic construct
  REGION 1..224: note = Synthetic
DEELKQTIEYLKLAVELAREMAEELGDEKALQMLKKIKKRIEEIEKRGDSYKAKILALVITALFAVLSALKAARELGDSEALEMLKKILERIEEILDKGDLKAAKIVYLVIRAAQLVLWALKIAYELGDEEALKMLKEILKRIEEILDKGDLEKAKILYLVILAALLVLQALKLARELGDESALRFLKAILRKIKEILERGDEDKAKHVYRLIALALEALKSKK

SEQ ID NO: 3005 - protein, 255 aa, synthetic construct
  REGION 1..255: note = Synthetic
KEEIEFLVRLLKLLAEVAKKMAKRLEEAGNKEQAEQFKKVLEEIERQIEEIERAGDLDKAKIVYAVIHALVAALRAMEQAQRLEEAGNKEDAKEFKKVLEKIVRQILEILRKGDKQQARIVLLVIQALLLALEAMFQAQELEEAGNKEQAKEFKKVLKEIVRQLKRILDTGDEKQAKIVLLVIQALLLALEAMKQADQLKKAGNKEDAERFEKLLTAIVKLLKKILEEGDEDKAKDVLSLIKTLLTLLELAQKLT

SEQ ID NO: 3006 - protein, 255 aa, synthetic construct
  REGION 1..255: note = Synthetic
KEEVKTAVAIAKAILESAKESAKELEEAGNKEQAKEFKKLLEEIERAIEEIERTGDKKKARIVLLVIKALQAALLAMQLADLLEAAGNEEQAKEFKKVLEEIVRQIFAILKRGDEKQAKIVLLVIQALLLALKAMFAADELEAAGNKEQAKEFKKVLEEIARQLKRILEAGDETQAKIVLAVIKALLAALTAMKQATALKKAGNKERAEAFERRLDEILKRLKEILEKGDLEAAVRVALKIKQLLLQLELQLLRK

SEQ ID NO: 3007 - protein, 248 aa, synthetic construct
  REGION 1..248: note = Synthetic
SLNEALKAQEAIAKALAVAERLKRLGNSSAEIILQILAELQRQLEEAYKRGDLSIIEFVRKMAEAVLLIALAILLALKLREKGNSLAEIILQILNELIKQLQEAIRRGDLEIIEKVATMAYAVLSIAKAIELAEKLKELGNSSAEIILQILKELIERLQEAIAKGDLETIEAVALMAAAVLAIAKAIELAQKLKELGNKKADEILKKLAELIRQLQEAIARGDLDQVWRVYVEASKLAIKAAEALRAI

SEQ ID NO: 3008 - protein, 236 aa, synthetic construct
  REGION 1..236: note = Synthetic
SSEEYLAVLYTALVVAFMASKLGDPDTLRTAKELFEELQRLFFELDEDQLRERAKRIKKTLDVLLTAMKVLELAKKLGDPDTLATAKKLLKTLLRALKELDEEQLLRRAEAIHQTLAVLLTAMAVLELAAALGDPDTYETAKKLLRELLALLEELDERQLLERLFAISQILAVLLTAMQVLELAKRLGDPDTLETAQQLLETLLRLLEELDEDQILKKAQEILEKLMKLYIALALK

SEQ ID NO: 3009 - protein, 248 aa, synthetic construct
  REGION 1..248: note = Synthetic
SLREALTALNAIVQAKLLAETLKELGNSSAEIILQILKELERQLDEAYKRGDLEIIEQVRKMAEAVLLIAKAILLALKLRALGNSSAEIILQILNKLIKQLQEAIARGDLETIETVAMMAWAVLLIAKAIELALKLKALGNSSAEIILQILQTLIERLQSAIDRGDKETIKAVALMAAAVLHIAKAIELAEKLKELGNKKAEEILRKANELIKQLKEAIARGDLDQVWRVFKEAVKLAHTAASALEKI

SEQ ID NO: 3010 - protein, 248 aa, synthetic construct
  REGION 1..248: note = Synthetic
TLEEYTEAVELIVKAQKAAKKLKALGNSSAEIISQIVEELMKQLMTAVKRGDLEILEKVRKMAEAVLLIAKAIEIALKLRALGNSSAEIILQILNELIKQLKEAIARGDLETIEKVLKMAKAVLLIAKAIELAEKLKAAGNSSAEIILQILKTLIKRLQEAIRRGDLETIEKVLAMAAAVAMIAKAIELALKLAALGNSKAEEILRKLNELIKQLQEAIARGDLSQIKRVLTEAFLTLATAKWILAAT

SEQ ID NO: 3011 - protein, 248 aa, synthetic construct
  REGION 1..248: note = Synthetic
SSQDFAKAFDLANKALKLAYALKRRGDSSAQTILEFVRKLLAQLLEAFKKGDEETLKKVLRMLEAILAIAQALVLAWELRERGDSSAQTILEFVRKLVEELKEALDRGDEEQVERVAQLLAAILAIAQALVLAHELRERGDSSAQTILEFVAKLVEQLHEAKERGDESTIKYVSLMLFAIYLAALALLLAEELRERGDSRAQEILEQVARLVEKLREALERGDEEEVKKVVAKLIEIYLKAYLAALEH

SEQ ID NO: 3012 - protein, 227 aa, synthetic construct
  REGION 1..227: note = Synthetic
TEEEKLAILLVEMALHNAAKIVKELGDEQLRTLIEQAERILEEAKRKGDSETLEFVALIARVVLALAKALALVKRLGDEELRKLIEKIMKTLQRAIEEGDKDRLKKVYLLAKVVLLLAQALELVKELGDSLLRKLIEQAMKFLAKAIEEGDEEKLKFVYTIALVVLLLAQALKLVKELGDETLRKLIEMAMKYLEKAIEEGDKSKLEWVYRFAATVLELAETNAELQ

SEQ ID NO: 3013 - protein, 227 aa, synthetic construct
  REGION 1..227: note = Synthetic
SEEETELYFKVVNALVAALELAARLGDEDLKRLIAQAFETLEEAKQKGDLSTLQKVYLIAEVVLLLAQALELVKRLGDEDLRKLIEQAMKTLQAAIEEGDDDKLKQVYLIAVVVLLLAQALELVKELGDEQLRKLIEQAMETLRRAIEEGDEDKLRFVYLIAQVVLHLAQALKLVKELGDERLREKIEKVMATLERAIEEGDKKQLKEVLKKALEVLWEAALAALKK

SEQ ID NO: 3014 - protein, 227 aa, synthetic construct
  REGION 1..227: note = Synthetic
SEEEKELFREVVNALAKALELVERLGDEKLATLIAQAFETLEEAYRKGDARTLQKVVLIARVVLLLAQALELVKRLGDEKLRELIEQAMETLQRAIEEGDEERLKFVYLIAKVVLLLAQALELVKKLGDEQLRKLIEQAMETLQRAIEEGDKKRLEFVYLIAHVVLQLAHALALVKKLGDEDLRKKIEKLMKTLERAIEEGDEKQLKEVATKALEVNFEAVLAALKK

SEQ ID NO: 3015 - protein, 211 aa, synthetic construct
  REGION 1..211: note = Synthetic
SEQMIQEAVKILELIVKALEAADNEKLEEFAREMLERLEQVLREGDPRKIKLIYIAVQIVLLIAKALKAADNEQLYRFAQEMLERLQQVLEEGDPRKIELIYIAVQIVLLIAKALQAADNEELYEFAARMLEQLQRVLEEGDPRKIKLIFHAVKIVLAIAKALQAADNEELYRKAQELLEQLERVLAEGDPKKILEIYLKVLKVYLEAQDT

SEQ ID NO: 3016 - protein, 211 aa, synthetic construct
  REGION 1..211: note = Synthetic
SEEMTTQALKIAETIWKALEAADNEKLYEFALEMLKRLAQVLREGDPRKIKLIAKAVQIVLLIAKALKAADNEKLYSFAQEMLERLQQVLEEGDPRKIELIRIAVQIVLTIAKALQAADNEQLYEFAQRMLEALQQVIEEGDPRKIKLIELAVHIVYQIALALQAADNERLYRAAQELLEELAEVLKEGDPKKIAKIASKVLAVQLEAIET

SEQ ID NO: 3017 - protein, 224 aa, synthetic construct
  REGION 1..224: note = Synthetic
SKESKLIAAFVRFLLALAKSAAKQLGDSQFQRMVEELERQLKEALEEGDPEKIRFIYIAAQVLLLLLRAYKKARELGDEAFQRMVEKLLKKLEEALREGDPEKIRAIYIAAQVLLLLLRALEKARRLGDEQFQRMVKQLLKALEEAVEAGDPARIFAIAVAARVLLMLLKAYEFARRQGDESFLKEVKKLLKALQEALEAGDPREIIKIAVRASELLHKLKREW

SEQ ID NO: 3018 - protein, 204 aa, synthetic construct
  REGION 1..204: note = Synthetic
SANVAVVRFFLKYAYELALELGNEELLKILEELERRLSSGDPRVVDWILKIAVAAVLLVTAYKLALEVGNEELLEILEELMKRLSSGDPDTVKRISKIARAAVLLLEAWLKAREVGNEELLRILEALMRELRSGDPDTVKKISEIAAAAKLLLDAWKKAAAAGNEELLKELETLMKALESGDPQAVDSISKLAALAVEKVAKEL

SEQ ID NO: 3019 - protein, 236 aa, synthetic construct
  REGION 1..236: note = Synthetic
SEMIKEALKELQRRIEEAKKTLKDEQKAREFSQELLEHIAATIAHILFAAVARKIETKGLSPEDLIRAVLEALQKAIELAKKTLKDEQLARQFSAVLLKMIARLIAKWLFAAVKKEIAKKGLSPEELIKKVLKLLQKAIELAKKTLKDEELARQFAQELLRMIAHLIAVELFNQVLKAIKDKGLSPEQLKREVKELLKTAIELARKTLKDEQLARQFEEQLKFSFKMLLTLQEKTN

SEQ ID NO: 3020 - protein, 255 aa, synthetic construct
  REGION 1..255: note = Synthetic
STSEFRETQEAQKLLEEAKRLAKKLEEAGNEEQARQIKEILEELQKRLYEANANGDPDTVALVKEIAEALSLLMQAFLLALALEAAGNERQAKQIKEILEELLKRLKEALEKGDPDTVRLVLEIAEALSLLMQAFLLARALEEAGNVEQARQIFKILEELLKQLKKALENGDPRTVRLVVLIAAALSHLMEAFLAALELEAAGNKEQAQKLKEELHELLKKLQEATENGDPDTVANVAHTAFLLALEMKEQLKRL

SEQ ID NO: 3021 - protein, 255 aa, synthetic construct
  REGION 1..255: note = Synthetic
TKELLKEFTEASKLLEQAKRLAKKLKEAGNEEQARTIDEILEELQKRLLEAFKKGDPRTVRLVKRIAEALSLLMEAFLLALELEAAGNEEQAKQIKEILEELLKRLKEALEKGDPRTVQLVLEIAEALSLLMEAFLLATELEEAGNKETAETIKAILEELLKQLKKATENGDPDTVRLVLTIAYALSLLMEAFLLALELAKAGNKEEAQKIREELKELLKKLKEAIEKGDPDAVANVAYTAYLLSVEMKEQLKRL

SEQ ID NO: 3022 - protein, 252 aa, synthetic construct
  REGION 1..252: note = Synthetic
WEEQILNLFLLALAIWLEILKLEEAGDEENAKKFKALVLKALKQLDEATKSGDPRDVERVERILRLVAIALKITKLMQELEKAGDKENAERFRHLVETAIEQLLKATESGDPRDIKRVELILYLVLLALAITFDMQELEKAGDKENAERFRELVEKAIEQLLEATESGDPRELAKVAFILHLVYAALLITKMMQWLEAAGDKEDAAKFREEVEKAIKQLKEATDSGDPRDVKRVFEELFRVAKKLFATFAKK

SEQ ID NO: 3023 - protein, 252 aa, synthetic construct
  REGION 1..252: note = Synthetic
WEETIKELVAIAFRILHEIHKLKKAGDKENATKFYELLKTALKQLDEAKKSGDPRDVERVLRILRLILIALKILDLMKKLEEAGDKENAERFRELIEKAIEQLKAATESGDPRDIARVERILRLVLIALKIVKLMQELEAAGDKTNAERFRELVEKAIEQLKEATESGDPRKVAQVKRILELVLLALEITLNIQELEKAGDKEAAEDFREAVEKAIAQLKEATESGDPRDIKRVEDELTKVFEKLLKTNAKK

SEQ ID NO: 3024 - protein, 252 aa, synthetic construct
  REGION 1..252: note = Synthetic
WEEKIKALKAIAREILHEIMKLEAAGDEENAKKFKELLKTALDQLKEAKDSGDPRDVERVERILRLVLLALKITALMQELEAAGDKENAERFRELVEKAIEQLKEATESGDPRDVARVERILRLVLIALKITKALQELEKAGDKTNAERFRELVATAIAQLKEATESGDPRKVAQVKRILELVALALQITLTMQLLEAAGDKEQAKAFREEVEKLIKELKEATESGDPRDVARVKENLERVSDKLYKTVLKK

SEQ ID NO: 3025 - protein, 252 aa, synthetic construct
  REGION 1..252: note = Synthetic
SETTIKLLETIATQIEMSIKALEKAGDKENAEKFRELLETALRQLAEAKRSGDPRDVARVERILRLVLIALEITHLMRELEKAGDKENAERFRELVEKLIEQLKKATESGDPRDVERVERILRLVLIALKITFAVQELEKAGDKENAERFRRLVEKLIEQLKKATESGDPRDVAHVEFILALVLLALKITKAMQKLEKAGDKEQAEAFREQIEKAIAQLEEATDSGDPRDVTRVFKELVKVLLRLSLTFLRK

SEQ ID NO: 3026 - protein, 221 aa, synthetic construct
  REGION 1..221: note = Synthetic
TELFLRHIQKVMKAIAELAKKTGDEQLERQLKELQEEWKKAKASGDPRQIAFVAKLIHALLLMAQITEKAQRTGDEELLRLLAELKAQWQEAKEKGDPREIQRVLELIKALLAMAKILEIAQKTGDEQLLRLLEALLREWQEAVRKGDPREIQRVLELIKALLLMAQILAIAQKTGDERLKEKLKKLIKDWEKAFREGDPTTIWLVLVAIESLLKEAKAKE

SEQ ID NO: 3027 - protein, 224 aa, synthetic construct
  REGION 1..224: note = Synthetic
TLELFLKALELLQEIFRRALEEGDSELLEQAKRLLKELKEVAKEGDESKLRFILLLLEALLLLVEILTRAKREGDERILEQAKKLSEQLQEVQKEGDEKKLRFILLLLKALLALVQILTIAKREGDSELLEQAERLAQELREVQEEGDESKLKFIVALLAATRHMVEILTWAKRAGDEEIRKKAEELKRKLEEVQRQGDESKLIRILFELSEFLMEVMETARKK

SEQ ID NO: 3028 - protein, 240 aa, synthetic construct
  REGION 1..240: note = Synthetic
FEETLTAIEVLVTLVKLHAKLAKDSETAQQLKELAAQLEALLREAKKTGDPRTLEFISQLAAILWLVAEVFQLAEAAKDSETRERLKQLAEQLLEQLQEALKTGDPREVQFILALARILILVARAFLLAEAAKDSEAAEQLKQLLKQLLEALQRALDTGDPRAVKFLETLAKILLLVAKIFLLAEAAKDEQTREELKQKAERLLEELQRALDTGDPSELIRIWLKAHKLLLEAEKALEAE

SEQ ID NO: 3029 - protein, 240 aa, synthetic construct
  REGION 1..240: note = Synthetic
FETMLELIEWLIKWVKAAAEKAKDSETAQQLKELAAQLEQLLREAKNTGDPRVLKFIMLLAKILLIVAHVFLLAEAAKDSETAERLKQLLEQLLELLQKALDTGDPRLVAFIAKLAKIIELVARAFLLAEAAKDEETAEKLKKLLKQLLEQLQEALKTGDPRKVEFILALAKILLLVAKVFLLAEAAKDSQKMEELKQKAAKLLELLQEALDTGDPALVEAILLYAHALIQEAEEWLKRE

SEQ ID NO: 3030 - protein, 208 aa, synthetic construct
  REGION 1..208: note = Synthetic
SSQDFDRIMRKVIELLKEAKKAGDPELIEQALQVAKAAAKAAQEGDERKMRFIELLVALIELLIEAKRAGDPELIRQAETLFELALRALKEGDETKMRFIAILVAVIALLIEAKRAGDPELIEQAERVVEEAQKAFEEGDEKKMRFIWILVQVIELLITAKRAGDPELIAQAEEVVKQAKKAYEEGDESKMKEISIQVLLILAAIALK

SEQ ID NO: 3031 - protein, 224 aa, synthetic construct
  REGION 1..224: note = Synthetic
SEYEEFIIKTVEELIKKIAEMARKLGDEKLRELVERAQQRLREAKETGDEEQLLFAQIILLIIELIARISEMAQRLGDEQLRELVERAMDLLAEAIAKGDLSTLVLAYTIFEVIELIAQVSEMAQRLGDSKLRELVERAMKLLKEAIEQGDQHQLHLAKAIWEVIILIAEISEMAQRLGDESLRKAVEKAMKRLKEAIEKGDEATLYAIKLVLKNIIALAKESK

SEQ ID NO: 3032 - protein, 224 aa, synthetic construct
  REGION 1..224: note = Synthetic
SEHLKFAIKLVEELIKKIKEMAERLGDEELRELVERAEQLLREAKENGDEHQLNFAAAILKVIELIARISEMAQRLGDSELRELVERAMRLLKEAVEKGDWSTLYLAYVILEVIELIAKISEMAQRLGDEELRELVDRAMKLLKEAIETGDLHQLTLAKAILEVIILIAQISAMAQRLGDETLRKLVESAMRALKEAIEKGDLATLWSVKTLLEIIIAFAKEAE

SEQ ID NO: 3033 - protein, 221 aa, synthetic construct
  REGION 1..221: note = Synthetic
TEELQHEIRVAVTLLVASAKHAGDSELRETAKELSRQVQKAVEDGDERKLERLKKQLEIMHLVIVLIVEARKAGDSQLRAEAKKLSKRVKRAVEAGDERQLEKLKKQLELMILLIKLIRLAREVGDDDLRKLAKELFRRVQEAVAKGDERKLEELKKQLEIMILVIKLIRTAREAGDEDLRRLAKELQRTVKEAVEAGDEDKLKLLESLLKKAIESIKFLK

SEQ ID NO: 3034 - protein, 221 aa, synthetic construct
  REGION 1..221: note = Synthetic
SLETLLELFQLISNLLLEAKKVGDSALRETAKELARQVDSAAARGDEEALKRLKKQLEIMILVIALIRLAREAGDEELRKEAKELFKRVKKAVEAGDESKLEKLKKQLELMILVIKLLRAAREAGDSALREAAKALLERVQKAVRAGDESKLEELYFQLWIMIAVIDLIRTAREAGDSELREKAKELVKQVKKAVEAGDIRKLLTLLKRLTEMLETIKAKK

SEQ ID NO: 3035 - protein, 221 aa, synthetic construct
  REGION 1..221: note = Synthetic
DKELEEELRLAVELLVISAKFAGDSELREQAKELSRQVQKALEAGDERKLEKLKEQLEIMHMLIALLASAKSAGDSQLRAEAKELVRRVKEAVEKGDDRALEKLKKQLELMLLVIKLIRSAREAGDSALREAAKELFKRVQKAVQAGDESKLEELKKQLKLMILVIELIRTAREAGDETLRRYAKKLFKQVKKAVEAGDERKLETLETRLKKFIESIKTLK

SEQ ID NO: 3036 - protein, 235 aa, synthetic construct
  REGION 1..235: note = Synthetic
TEEEKAELQKQFRRILELIRQALAQGDKDVLRLLFEALKELQKAAETGDPRQIERALRIAKLVEQMFEINQLIEEAKAKGDEEAIKLAEEAAEELLRAAKTGDPRQITRALLIAELLRLMFEIRKLLERAKKEGDERIIELLEAAFRELLRAAKTGDPRQIERALRFARLLFLMFEIAALLEAAKRQGDEELLKELEKAKEELLRAAKSGDPREIKRAWLTAAKVVIKFLEAQAK

SEQ ID NO: 3037 - protein, 235 aa, synthetic construct
  REGION 1..235: note = Synthetic
TEEEIAELKKAMWYIKLLIENAKKKGDERLIRLLEEAVEELERAAKTGDPRQIERALQLAKLLEIMWEINSLIEKAKEQGDERVIRLLEEASEELLRAAKTGDPRQIERALRIAKLVRLMFKIRELLERAKEKGDERLLKLLEQALQELLRAAKTGDPRQITRALLIAELVFQMFEIKDLIEEAKAQGDEEIIKLLEKASEELLRAAKTGDPRQIKSAQALAKLVKKYFEDLQKQ

SEQ ID NO: 3038 - protein, 233 aa, synthetic construct
  REGION 1..233: note = Synthetic
SEELSDAVLKILAELMAIATELAKEGDEEQLKLVKELLRQLKEAQEKGDPRDLALALALAKVFKLMHELARIKKELEEEGDEEQLRLVKELIEKLKRAIEKGDPRELSQAYALALVFKLMKKLLEQYEELAREGDEEQLRLVKELIEKLREAIRRGDPRELATAMALAALFELMKKLKEQAKELEKEGDEEQLKRVKELIERLKEAIKRGDPRDLSKALAAAMAFFILLKSKK

SEQ ID NO: 3039 - protein, 233 aa, synthetic construct
  REGION 1..233: note = Synthetic
TTQLLEHVLKLAAELMAQATELKKEGDEDQLKLVKELLRALKEALARGDPRDLTLAAALAEVFKLMHELLRIKKELEEEGDEEQLKLVKELIEKLKRAIEKGDPRELQQAYALAVVFKLMKKLLEQYKELEKKGDEEQLRLVKELIEKLKEAIRRGDPRELHLAILLAKVFELMKKLDEQYEELAREGDEEQLKRVKELIERLQEAIRRGDPRDLWDAMAKAMAFFLLQESKK

SEQ ID NO: 3040 - protein, 221 aa, synthetic construct
  REGION 1..221: note = Synthetic
TWLAMLKAFELIWDVLALAAKAGNEELLQLARELLERLTEVVKRNDLEQLKILLAMAEALYYIVLVFLLAQAAGNEKLLQLARELLERLKEVVERNDLSQLEILVAMAYALWAIVQVFILAQEAGNEKLLRLAEELVERLKEVVERNDLSQLTILAVMASALLAIVEVFILAQEAGNEELLRRAEELVDRLKEVVERNDLERLKELHQEALALAVKVKVAR

SEQ ID NO: 3041 - protein, 224 aa, synthetic construct
  REGION 1..224: note = Synthetic
SEELKKLLKKAHELIVEALIAALELGDKSFAEVAKEVHERLEQAEREGDEEEVKLIYTIARALLLILKAIKIAKELGDSEFLKFAQKVMAQLLAALRAGDSKKVKLIYLIAIALLAILKALKMAYELGDSRFLKFAKEVMKRLERAFAEGDMRKVELIYLIAKALVSILAAIIAALRLGDERALERAEELMQRLLRALREGDSEAVKEIAKEANALLFELLTQE

SEQ ID NO: 3042 - protein, 212 aa, synthetic construct
  REGION 1..212: note = Synthetic
SEFELLLLLLQIQLLLALAESAGVDEELLQAIRELAERAWKAAANGDPRKVYLLTLLAQILFLLAQAKLAGVDEELYQAIRELLERAFKAAENGDPRKVTLLTLLAEILFLLAQAKLAGVDEELYQKIRELLERAFKAAENGDPRKVRLLTLLARILFLLAQAKLAGVDESVYKLIEAAMKAAFRAAENGDPSTVATATRAAEEALSKALTK

SEQ ID NO: 3043 - protein, 212 aa, synthetic construct
  REGION 1..212: note = Synthetic
TELELKLAASQIYLLLLLAKSAGVDEELFQQIRELAERATKAAKAGDPRKVYLLTLLARILFLLAQAKLAGVDEELFQKIRELLERAQKAAENGDPRKVTLLTLLAEILFLLAQAKLAGVDEELYQKIRELLERAFKAAENGDPRKVRLLTLLARILFLLAQAKLAGVDETVFQLILTAMKEAFKAAENGDPDAVEKATAAAESIASAARTV

SEQ ID NO: 3044 - protein, 250 aa, synthetic construct
  REGION 1..250: note = Synthetic
SLELALLLLAAQWYLIAVRFKMQELAKEDPDTFRTLEEILRKIQELLNKAAKTGDLETAKIASAIAAAAFYLAQVAVLMKKLAKEDPRTYKLLEKIVRLILKLLLEALDKGDEETALIALAAASAAFYLAQVAVTMKALAKEDPRTYKLLAEIVQRILELLRQALETGDQHAAAIALAAAIAAFALAKVAVKMRELAKEDPQTYRELQELVERVLELLKEALEKGDWETAWEAYVAALKAAFTAKAAATK

SEQ ID NO: 3045 - protein, 250 aa, synthetic construct
  REGION 1..250: note = Synthetic
SSTIKYAAFKAELALRYVERYMARLAKEDPETYRTLEQIVRLIRELLDKAKKTGDEKTAHIAVAAAEAAAYLAAVAIQMKSLAKEDPDTYRALEKILKLILDLLRKALETGDSTAANIAAAAASAAYYLAKVVEAMKRLAKEDPRTFDLLKKIVKQILELLRQALERGDMETALIVMAAAAAAYYLAEVAVLMKSLAKEDPQTYRELKEQVERILEKLLEALEKGDEETALELYVAATLLFQTAVEAAKK

SEQ ID NO: 3046 - protein, 226 aa, synthetic construct
  REGION 1..226: note = Synthetic
SESHKVLAAILKALLAFFTMYEQAERLGDKRLAEKIEKFLKALFEIALKVIKSGDEKTLRLAAVLAKIAEAIVQFLRMLSEAERLGDKWLAEEIRQLTADLEEIFEAVKKSGDDRTLELAYVLAVIAEAIARFLRMYSEAERLGDKRLAEAIERLTRQLKELFKKVKKSGDEETLKKAYYLALIAITIVLLLKLLAIAERLGDKEAAKALKAMTKHQEEEFEKYRK

SEQ ID NO: 3047 - protein, 226 aa, synthetic construct
  REGION 1..226: note = Synthetic
SEDLKVSAAILRLLLQFFKMLKEAERLGDKSLAEAIKRLLKKLFEIAAKVNKSGDEKTLRLAKVLAQIAEAIVQFLRMYAAAERLGDKSLAEEIAQLLEKLWEIFDKLKKSGDERDLELAKVLALIAEAIVRFLRMYKEAERLGDKRLAEKIEEFTRQLKEIFDQVKKSGDEETLKLAETLALIALTIVLAQELYSIAEELGDKEAAKALAEMTAANEEKFERTRK

SEQ ID NO: 3048 - protein, 274 aa, synthetic construct
  REGION 1..274: note = Synthetic
DLEAARAALAASEAAAAVFEIAEEIKRAGGSEEIKRLIARLLELAKELVKKILEAAKRGDEDKLKMLLLAVEAVLIAARVLQIALQIKLAGGSEEIQKLIRRLLELAQDLVEKIIEALKRGDKKKLEMALIAVAAVLLAAQVLAIALEIALAGGSEEIQKTIRELLELAQEIVETIVEALKRGDEKKLRMALLAVEAVLAAAHVLKIALEIALAGGSEEIQRKIKELLQKARELVRKIVEALKRGDEEKLKKALAKVLLVAAEANLLAAELRER

SEQ ID NO: 3049 - protein, 291 aa, synthetic construct
  REGION 1..291: note = Synthetic
TEEKAEAADYFAKLLKAAASSVEHTIKKLKAAGVVDEREVAALKRLIEEAVAIAEEAKKTVAKDPDTAEYLARAAEFLARLVLMAVELLAKIALLERAGVVDEREVERLKKLIKKALRIAQEALETVRKDPDTAEKLAKAAEFLAKLVLMAVEVLKKIAELEKAGVVDERDVAKLKQLIRKALEIAEEALETVRKDPDTAEALAKAAEFLAQLVLMAVEVLLQIAQLERAGVVDKREVEKLKEAIKAALDTAEEALETVRKDPTKAALAAFKARLTAKNVKLTVELAATLT

SEQ ID NO: 3050 - protein, 291 aa, synthetic construct
  REGION 1..291: note = Synthetic
TKEDKEHAEWFLKKLEEMAKKVEEKIAQLKRAGVVDERELEQLLRLIKEAVKIAREAKKTFDKDPDTAKALAHAALILAALVDMAVEVLTQIAKLEKAGVVDEREVARLKALIKKALRIAQEALKTVRKDPRKAMALALAALFLAKLVKMAVEILKKIAELERAGVVDSRDLETLKQLLRKALEIAEEALKTVEKDPTTALALAWAAEVLAQLVKMAVEVLETIAKLEAAGVVDSRKFAKLKEKIKTALKLAEQALETFRKDPALAYFLAELAKAIAEQVKREVERLAREA

SEQ ID NO: 3051 - protein, 271 aa, synthetic construct
  REGION 1..271: note = Synthetic
SELIKLIALLLKLHSKLIKELAERLKRLFTDPKLEELIKQIEKIMKKALETVREALERGDETLAKIAHIALQLAWLVLKIFEKAAELKNLFTDPKLEEFLAQIEEIMQKALETVEEALDRGDETLARIALIALKLALLVLEILEKLQRLKNLFTDPKLEELVKRIEAIMKKALEIVLEALERGDEDLARIALIALKLALLALQIFELLERLKNLFTDPKLEEVLKAIEKVMAIALKLVEEALEKGDTSTAKTALELLESALKFLEALFKTR

SEQ ID NO: 3052 - protein, 213 aa, synthetic construct
  REGION 1..213: note = Synthetic
SKEEMKTILELAKTAVSSFARDNPELVKLLEEELEQIARRSAKNKEAAYELAVMILILAEAAHLVSLFARDNPRLVERLKEELIRIVEASRKNKEKAKFLAEMILILAQAAALLARFARDNPELYERLVQELIAIVEQSRKNKEKAFLLAQMILALAQAAYLVAQFARDNPEQVEDLKRKLAEIVERSRKNAEEAFLQAYKLLLKANSAAFAA

SEQ ID NO: 3053 - protein, 271 aa, synthetic construct
  REGION 1..271: note = Synthetic
DSLIKSILLWLKLASKLIRRRLEELKKLFTDPKLDELLKQIEKIMEKALETVKEAIERGDEALARIAYIALELALLFLKILALLQRLKSLFTDPKLDEQIKTIEKIMQKALETVEEALERGDETLARIALIALKLALLALEILELAQRLKNLFTDPKFDEELKRIEKIMQKALETVAEALDRGDEKLARIALIALKLALLSLELLELAERLKRLFTDPTLEEIIETIEKLMTSALKTVAEALERGDESAAKAAEESLALAAQVLKMAAELQ

SEQ ID NO: 3054 - protein, 271 aa, synthetic construct
  REGION 1..271: note = Synthetic
SSLIKAIELWLKFASKEIRKRAEELKKLFTDPKLDELIKQIEKIMKKAFETVREALERGDEALALIAYIALALILLFLKILLDLQRLKSSFTDPKLDEFIKQIDKIMQKALETVEEALERGDEKLARIAAIALKLAKLLLEILTLAQRLKKLFTDPKLDEELARIEEIMQKALETVLEALDRGDEKLATIALIALKLALLSLEILELLQRLKKLFTDPTLEELIETIEKLMASALKTVKEALERGDEDAAKAALFSLELLAQILKAAFRLQ

SEQ ID NO: 3055 - protein, 275 aa, synthetic construct
  REGION 1..275: note = Synthetic
QELIKLALTSIRLMSELLKSKLEKLRKLYGNSPELKEEIEKLKKIVAKAEEMAKRALEENDEKQIRIAHTLVAIALLVADLLEKLRELRALFGNSPELKEQLEKLQTIVAKALEMAQRALEENDEQQIRIAYLLVQIALTVAKLLELLLRLAKQFGNSPSTAELIEKLQRILDKALEYAQRALEENDEDQIRLAYLAVQIALLLAQLLELLLELTKAFGNSPELQRALEELYKIIETALALVQRAFEENDKAQIETAYKAIESALRYAQTLKKER

SEQ ID NO: 3056 - protein, 287 aa, synthetic construct
  REGION 1..287: note = Synthetic
REEVKTELTEMYEKALHIFLAILETLLELKKIGVPEEQLKKIEELARQALELLEEAKARADKDDRRAKTAAELALMLVEAALIVAQILKTLERLKEIGVPEEQLTKIQELAEKALELLKEALELWNKDDKRAKLAAKLALMLVQAALIVARILKTLEELKEIGVPEEDLKKIQELAEKALELLAEALDLWNKDDRRAEIAARLALSLVNAALIVAKILKILERLREKGVPEEQLKEIRRVAKEALETLLRALELWNKDDERALKAAHKAQEKVIKALITALELAKKI

SEQ ID NO: 3057 - protein, 287 aa, synthetic construct
  REGION 1..287: note = Synthetic
REEVKTRLTEMYQKALRIFLAILFTLLELKEIGVPEEQLKKIEELARRALELLAEAKRLADKDDRRAKIAAELALMLVEAALIVAQILKTLERLKEKGVPEEQLKKIEKLAEKALELLAEALELWNKDDRRAKIAAKLALMLVRAALIVARILKTLEELKELGVPEEDLEEIQKVAEKALELLLEALDLWNKDDRRAEIAAALALHLVKAALIVAEILKTLEELRQKGVPEEQLKEIERVAKAALEQLKKAIELWAKDDSRALTAAHEAYEQVVKALLTALELKFKY

SEQ ID NO: 3058 - protein, 287 aa, synthetic construct
  REGION 1..287: note = Synthetic
SEEIKHQLELALDLAKLIVKLIEQMLKELKEKGVPEEQLQDIQELAEKALKLLEEAKRLADKDDRRAKFAAKLALMLVKLAQIVAEILKTLEELKEKGVPESQLKKIEEYAQKALELLKEALDLWNKDDRRAEVAAKLALMLVAAALIVARILKTLEELKDIGVPEEDLEEIQKVAEKALELLEEAIALWNKDDRRALVAAKLALMLVEAALIVAQILKTLERLAEKGVPEEDLKTIRKIAKAALELLKTALALWAKDDTRALELAKEALEMVKTALSQAKLLAELY

SEQ ID NO: 3059 - protein, 287 aa, synthetic construct
  REGION 1..287: note = Synthetic
REEAKTWLALALQYAKTIVKMIETLLAALKRTGVPEEQLEKIQKLAEAALKLLEEAKRLADKDDRRALIAAELALMLVEAALIVAQILYVLERLAQKGVPEEQLEKIQKLAEKALELLAEALELWNKDDHRAKLAAKLALALVKAALIVARILKTLEELKEIGVPEEDLTTIQELAEKALELLAEALALWNKDDRRAEIAAKLALLLVEAALIVAKILKTLERLRQKGVPEEVLKEIRKQAKAALEQLARALELWAKDDSKALLAAEYALANVRLALEYAEMLDELK

SEQ ID NO: 3060 - protein, 287 aa, synthetic construct
  REGION 1..287: note = Synthetic
SEEIKTRLELMLTEAKFIVRSIEFTLKALRALGVPEEKLKKIQELAEKALKLLEEAKRLADKDDRRAKIAAELALMLVKAAQIVANILLTLERLAQKGVPEEQLKKIQTVADEALDLLKEALELWKKDDRRAKIAATLALMLVKAALIVARILKTLEELKEIGVPEEDLQKIQELAEKALELLREAIALWAKDDRRALIAAKLALMLVEAALIVAQILKTLTRLRQKGVPEEQLKEIKKQAKKALEDLLKAIELWNKDDTRALKTAFKAALTVKLALYIAEMLAFIY

SEQ ID NO: 3061 - protein, 287 aa, synthetic construct
  REGION 1..287: note = Synthetic
TEEVKTELTLMYLTAVAIVEAIERILKELRKDGVPEEQLAKIQELAEAALKLLEEALRLADKDDRRAKIAAELALMLVEAALIVAKILKTLELLKRTGVPESQLEKIQKLAEKALELLKTALALWNKDDTRALFAAKLALMLVQAALIVAKILLTLANLAKIGVPEEDLKTIQTLAEKALELLLEALDLWNKDEKAAWVAAWLALMLVEAALIVAQILKILERLRQKGVPEEQLKAIRKEAKAALEKLKRALELWSKDDKKAFLAALQALLEVREALEKAKTLAQAV

SEQ ID NO: 3062 - protein, 271 aa, synthetic construct
  REGION 1..271: note = Synthetic
DEERALTVWQLALNVLTIVKKILQRATDPKLRDFAKKLLEQLERLLKEFEKALKEGDEEKLRLILLAFEALLLAAQVALIVVEIRQRATDPNLRRLAQQLLEQLDRLLKQFKRALEEGDQEKLRLIIMAFKALLLAAQVALIVVEIRQRATDPDLRELAQQLLEALEQLLKEFAQALKEGDQEKLRLIIMAFKALVHAAAVALAVVEIRQRATDPELKEFAKRLLEQLERLLKQFRRALEEGDQQKLKEILLAFIKLLYAALKALFAIDER

SEQ ID NO: 3063 - protein, 203 aa, synthetic construct
  REGION 1..203: note = Synthetic
SESLKVALAIAESALKLVRKIDPRMESVLRELQRLIQEAKENNDEELAKLIATLAQALLALVTVKKIDPAMAEVLEKLLALIKEAIENNDLKLAQLILILAAALKFLLEVKKTDPSMEEVLAELLRLIKEAVENNDLDLAKLILILARALAFLVKVKKIDPAFAKLLKTLLTMIEKAIRNNDLRLAEEILWLAVLAANNVKTK

SEQ ID NO: 3064 - protein, 252 aa, synthetic construct
  REGION 1..252: note = Synthetic
SEEILELFAKISTLLEKVAQLAKQLGDEEMVKQVMELLEQAVKLALQYLKTGDPRYLFALKVLLKLAQLLYLLLQVARLAAELGDSTMLEQVKKLLQQAQRLAQQLRDTGDPRYEKALEVLYKLAEILYLLLQFARLAKELGDEEMIEQVKKLLQAAQRLAQQLRETGDPRYEFMLKVLALLAHILAALLQVARLAKELGDEEQIEEIKRRIQKAQRLARQLRETGDPRYADKLAELAFEAHALAITLKKRV

SEQ ID NO: 3065 - protein, 271 aa, synthetic construct
  REGION 1..271: note = Synthetic
SEAVLWFAEHNVKRAEEIIEELQKAATSPEIEKLLKQLQESLEKALRRLKEAAKAGDKKAMYLAYALIEAVVKVAKALLIILELERAATSPEIKKLLEQLRRLLEHALRRLQEAHEAGDSQQMKLALQLIQFVALVAEALLIILRLQRAATSPEIEKLLQQLLELLEKALKRLEEAHRAGDEKQMRLALQLIKAVVKVARALEIILELERAATSPRIEEALRTLRKLLEEALKMLQEAHETGDEALMELALSMIDAVLEIAEELLRKLKEQ

SEQ ID NO: 3066 - protein, 271 aa, synthetic construct
  REGION 1..271: note = Synthetic
LEELLERAERLAKTAAKILSQLYRAATSPEIEKLLKQLAKSLEKALKRLKEAYKAGDEKQMRLALQLIQAVVLVATALLIILELERAATSPEIEKLLAQLRRSLEKALRRLQEAFEAGDEAQMRLALQLIAAVVLVAEALLIILRLERAATSPEIEKLLQKLRELLEKALKRLEEAFKAGDEQQMRLALNLIQFVVLVARALWAILALERAATSPEIEEKLKRLRESLERAFEKLARAHEAGDESQMREALAEIKKVVEEALKLLLKLLAE

SEQ ID NO: 3067 - protein, 259 aa, synthetic construct
  REGION 1..259: note = Synthetic
SETMKWIEATIKHLASAVKAALTLLAKLGVDPEKLRQLQELIERILEAAEEASRSGDEKQLRMVEILARIVLTVAEVLKNLYKLKRAGVDPEKLRQLEELIERILKAAEEASRSGDETQLTMVALLARIVLTVAKVLQLLYELFKAGVDPEKLRQLAEFIEEILKQAEEAYRSGDLHELLMVETLASIVLAIAKVLKNLHELKEAGVDPRKLAALERQIERILKEAKEAAEKGDEDTLTKVQEKALKVLAEAEALKEKK

SEQ ID NO: 3068 - protein, 259 aa, synthetic construct
  REGION 1..259: note = Synthetic
TAEIAKILNTILELANAVDENLRKLAEAGVDPEKLRQLKELIKRILEQALKAAESGDEKQLRMVEILARIVLLAAEVLKNLYRLKKAGVDPEKLRQLEELIERIIKEAEKASASGDEATLRMVEALAKIVLTAAKVLQNLYELKKAGVDPEKLRQLEEFIEEIIKAAEKAYKSGDEHELAMVLQLASIVLAVALVLKNLYELFKAGVDPRKLEKLARQIERIFKEAKKAYESGDMDELLKVAMKAMKVLLAAKTLKAER

SEQ ID NO: 3069 - protein, 259 aa, synthetic construct
  REGION 1..259: note = Synthetic
TEEASKDLKKLAKQALEAKKLIEELKRMGVDERKLKELWEKFLEIMKKLMEAAKKGDSKKLEIAKDLMEVALQFLRALKKIHELKAMGVDSRKLKEIDEDFKKILEKLEEAARQGDDKQLQIAKDLMAILLQFLEALELIHKLKAMGVDSEELKQVDEKFKEILEKLKEAFKQGDERKLRIAKALMEVLLTFLRALELIRELKEMGVDSEELRQIQEAFKRILEKLEEAARQGDEDALRKASFEMSLLYLALVMMLFEV

SEQ ID NO: 3070 - protein, 259 aa, synthetic construct
  REGION 1..259: note = Synthetic
TESASKDLHAVAEKAKEAEKLIEELERMGVDSRKLKEVYEKFLEIMKRLLEAAKKGDERKLQIAKDLMDIALQFLRALRKIWELKAMGVDSRKLKKLEEEFKEILEKLEEAARQGDSRQLQIAKDLMAVLLQFLEALELIKKLKDMGVDSEILKQLEEKFDEILEKLKEAAKQGDERKLRIAKALMHILLQFLRALQLIRKLKEMGVDEEELKRLEEAFKRILEKLEEAARQGDEKALAEANLEMSFALVKLVLMLLEK

SEQ ID NO: 3071 - protein, 259 aa, synthetic construct
  REGION 1..259: note = Synthetic
SSEAAADLQMVQLQFESAKIIIKMLKETGVDERKLKKLEEKFEEILKKLKEAAKKGDEKKLETAKDLMEVLHQFLVALALIAKLKQMGVDSRKLKEVEEAFEEILEKLEEAARQGDDRQLRIAKDLMAVLLQFLEALELITKLKEMGVDSEELKQLEEKFKEILEKLKEAAKQGDERKLRIAKDLMEILLQFLRALELIHELRAMGVDSEALRTVQEAFKRILEYLEEAAKQGDETALKVAKAMMEILLATLKWMRSLK

SEQ ID NO: 3072 - protein, 259 aa, synthetic construct
  REGION 1..259: note = Synthetic
SARELNTQLRILEIAAKIKKLLKELKKAGVDSRQLKKLEELLKEVEKLVTEARKQGDEKQLRMAQTLAEIILIAAQILLLLHELRKAGVDERFLKWLKELLEEVIRLVQEAVKQGDEKQLRMAKHLAKIILIAAQILALLFKLRQAGVDERILKKLDELLKEVLRTVKEAVERGDEWALSLALLLAKIILIAAQILELLHQLAEAGVDSRELKRLKEELEEVLKLVEEAAKQGDDEQLLEAFKRALEILLRAKELKEEY

SEQ ID NO: 3073 - protein, 262 aa, synthetic construct
  REGION 1..262: note = Synthetic
SERKEVELAELQVILTAILHAVRRAKKAGLDPEVARKLEETAEQLEREMKRALEAGDEEKLRKIKRTAELLLILAKIVLLVALAKQAGLDPEIVRKLLERALELLEKMKEALEMGDEEALRKIVRTAELLLILAKIVLLVAQALQAGLDPKTAKKLLEQALALLEKMKEAAEMGDEEALRRIYRLAELLLILAKIVLLVAQAKQAGLDPREAEELLRKALELLEKMKEAIEMGDEKKILKILAAAYSLLAQAETVLREAQAK

SEQ ID NO: 3074 - protein, 203 aa, synthetic construct
  REGION 1..203: note = Synthetic
SELLKVILWSAETALKLVAKIDPTMEQVLRELQRLIQEAKENNDEELAKLIATLAHALLALVKVKKIDPAMKEVLEKLLELIKEAIANNDLKLAQLILILAAALLFLLEVKKIDPRMARVLEELLRLIKEAADNNDLDLAKLILILARALWFLVKVLKIDPTFAEVLEALLTLIEKAIKNNDLRLAETILKLAASALELVKTK

SEQ ID NO: 3075 - protein, 221 aa, synthetic construct
  REGION 1..221: note = Synthetic
SELEQKLLDALLKFAEQAAKKLGDEEFLKLLAQLKRRAEEAKKRGDDDTIKQLIKQVKLIAMLILAFYLVQKLGDETLQKILEQLWRKAKEAIERGDERQIERLIKAVKLILLLVLAFLAAEKLGDERLKQLLRELLRKAKEALERGDSKTIEFLIKAVYLILLLIKALLMARELGDEDVKRNLERLLEKAKEALERGDETAITVLILLVALHYTWVEALK

SEQ ID NO: 3076 - protein, 274 aa, synthetic construct
  REGION 1..274: note = Synthetic
SEEDIRALLEIFTLVHKALELATAAAEIVTDPTFRKIVQKIRELATKMLEQLFEAAKRGDKKKLEEIRRTVEILWLVAQAVLLAAKAYNTVTDPEFRKIVKRILELLLDMLKKLEEALERGDSRKLEEIRVTVEILWLVAQAVLLAAKAYAIVTDPAFKKIVKKILKLALKMLEKLKEALERGDEQKLREIRLTVEILVLVAHAVLAAAKAYNLVTDPRFKEQVKRILKALLRLLEELEEALERGDEDKLKKILAKVLKLAWEANEVLLAAEKY

SEQ ID NO: 3077 - protein, 274 aa, synthetic construct
  REGION 1..274: note = Synthetic
SEEETRKAYEISVLVLKAIDLAKKAAKIVTDPAFRALVKQIEELARKMLKQLEEAAKRGDERKLEEIRKTVEILWLVAQAVLLAAKAYATVTDPEFRKIVKRILELALQMLKQLEEALERGDEKKLELIRTTVEILWLVALAVLLAAKAYAIVTDPTFKKIVKKILKLALKMLKKLQEALERGDEQKLREIRLTVEILWLVAWAVLAAAKAYQIVTDPRFKEQVKRILKQLLRMLEQLEEALERGDERKLEEIRKRVETLAAEANWVLLKALAT

SEQ ID NO: 3078 - protein, 274 aa, synthetic construct
  REGION 1..274: note = Synthetic
SEEEKMFTAHIEELLRKAADLAQKAAELVTDPQFKKIVQKIKELVEKMKKQLEEALRRGDKSKLLEIHTTVAILWAVAVAVLLAAKAYATVTDPEFRKIVKAILELALQMLDQLEEALERGDETKLEKIRLTVEILWLVAQAVLLAAKAYALVTDPTFKKIVARILRLLLKMLEQLREALERGDDQKLKEIRTTVEILWRVAQAVLLAAKAYATVTDPRFKEQVKEILKTLLKMLEKLEEALERGDEKKLYWIKVVVNYLYARAAAVLEEAKKY

SEQ ID NO: 3079 - protein, 274 aa, synthetic construct
  REGION 1..274: note = Synthetic
SLEDATLIFKIVSAVLRASDIAHALKETLRTPQIEKLVKLLSTVATQILREMLRALKENDSRTLEQLVKFAKILYFVAEALQIALELLETLRTPQIEKLVQLLLTVAEQILEQMRRALEENDESTLEQLLKIAWILWAVAKALQIALELLLTLRTPEIEAQVQLLLKVAEQILEQMRRALEENDEDTLEQLFLIALLLLAVALALQIALYLARVLRTPEIEAKVQELLEKAAEILEQMLRALEENDERTLEKLLTKALLLLIEAVELYHKLLHT

SEQ ID NO: 3080 - protein, 274 aa, synthetic construct
  REGION 1..274: note = Synthetic
TLEQSLLVMKIAAAVRRALEIAAALKRHLRTPQIEKLVKLLFTVAKQILKEMLRALKENDERTLEQLLKFAKILYFVAEALQIALELAETLRTPQIEELVQLLLKVAAQILEQMLRALEENDESTLEQLLTIAWILYAVAKALQIALELYETLRTPEWEELVQLLLTVAKQILEQMRRALEENDEDTLKQLFSIASILAAVATALQIALQLEEQLRTPEVKAKVKELLEKAKEILEQMRRALEENDESTLEKLQKTAAILFVEAILLLAELLEH

SEQ ID NO: 3081 - protein, 274 aa, synthetic construct
  REGION 1..274: note = Synthetic
TLELSLLVQKIVSAVLRALAIAHALKKHLRTPQIEKLVKLLFTVATQILREMARALKENDSRTLEQLLKIAKILYFVAEALQIALELEETLRTPQIKKLVQLLLKVAEQILEQMRRALEENDEETLELLLKIAWILYAVAKALQIALELFEALRTPEWEKLVQLLLAIAEQILEQMRRALEENDKSTLDKLFSIASILAAVATALQIALELERRLRTPEIEKKVQELLEKAKEILEQMRRAWEENDDETLKKLQLKAALLLIEAVELYAKLLAK

SEQ ID NO: 3082 - protein, 274 aa, synthetic construct
  REGION 1..274: note = Synthetic
SAEDNTKLYKIMYFVAVAEFIAEALKDTLRTPQIEKLVKLLKKVLEQIKEEMKRAYKENDKRTLDQLLKIAKILWFVAEALQIALWLKEFLRTPQIDKLVQLLLKVAEQILEQMLRALEENDESTLEQLLTIAKILYFVAKALQIALALYEFLRTPEWERLVQLLLAIAEQILEQMRRALEENDERTLEQLLLIAAILYYVALALQIALELEETLRTPEIEQKVRELLEKAKEILEQMRRALEENDEETLTKLYHKALRLALEAYLLKLALEKH

SEQ ID NO: 3083 - protein, 274 aa, synthetic construct
  REGION 1..274: note = Synthetic
SWEANSKWATIMYFVALAEYIAALLYETLRTPQIEKLVELLKKVAEQIKEEMRRAHAENDERTLAQLDKIAKILYFVAVALQIALELLEFLRTPQIKKLVQLLLTVAEQILEQMRRALEENDESTLEQLLTIAKILYFVAKALQIALELYQFLRTPEWEKLVQLLLTVAEQILEQMRRALEENDERTLEQLLLIAALLYLVAYALQIALELEEALRTPEWKAKVAELLEKAKEILEQMLRAFEENDEETLAKLSRKAFQLALEAFELELELKRT

SEQ ID NO: 3084 - protein, 274 aa, synthetic construct
  REGION 1..274: note = Synthetic
SEEDKVLIALIKTAVKTAEDIARKLYEHLRTPQIEKLVELLKKVAAQIKEEMSRAEKENDEDTLFKLLLIAYILKAVAEALAIALWLLEFLRTPQIKKLVQLLLKVAEDILEQMRRALEENDDTTLNRLSTIATILWFVAVALAIALWLYQFLRTPEIEELVQLLLKVAEQILEQMKRAEEENDERTLEQLLTIAKILYFVAKALQIALELKETLRTPETDEKVKWLFALARWILKQMLRALEENDESTLNLLLLLAAELYRTAEALRRELEEF

SEQ ID NO: 3085 - protein, 200 aa, synthetic construct
  REGION 1..200: note = Synthetic
SEEQEEKARQVYAAIAKVFNILFMLKATGDDESIKTLTKLLATLLRKLDEALALNDEDALERILKFAKVLFLIAQVFLIMAALKLTGDDESIETLRDLLRKLLALLKEADELNDERLLERILKFAQVLYAIALVFLNMAWLKAYGDDDSIKELRQKLKELLEKLREALELNDEELLKRILKEAARLAEKAAAATFKAAKK

SEQ ID NO: 3086 - protein, 203 aa, synthetic construct
  REGION 1..203: note = Synthetic
SERLKIILTLAETALKTVKKIDPAMEEVLQELQRLIQEAKENNDEELAKLILTLALALHALVAVKKIDPRMKEVLEKLLELIKEAVKNNDTKLAALILILAAALKFLLEVKKIDPAMAEVLEELLRLIKEAAENNDLDLAKLILILARALVFLVKVKKIDPTFAELLEILLTLIKKAAKNNDLRLAEWILYLAKVMWELVLSK

SEQ ID NO: 3087 - protein, 255 aa, synthetic construct
  REGION 1..255: note = Synthetic
SEEIKAKAQAALEYAKRAAKLIKKLATSPLVEQIVREILEAIKEAEEEIKNVDEDQLRQVLIFAQALAYLATALLLALTIAKHATSPLVEQIVEEIMRAIYEAAQRIKNVDEDQLRQVLILAQALYYLASALLLALKIEAKATSPLVEKIVEEIMRAIREAAARIKNVDEQQLRQVLILAQALYYLASALLLALRIEEKATSPEVRETVERIMRAIRDAAKEIKNVDEEQLRKVLIKAKLLYALAALLLHYLESE

SEQ ID NO: 3088 - protein, 274 aa, synthetic construct
  REGION 1..274: note = Synthetic
SLEALLLALTVSELVTRAERIVKEIKKKATSPEIREVAERVEEFLKQIKRTIREAADRGDEERLRMALLAAQIALLVAKALLLVIEIFRKATSPEIRRVAETVLRILQQIAETLTQALQKGDEERLRMALAAAKVALLVAKALLLVIEILKKATSPQIRAVAKQVLRILQQIARTILEALERGDKKALTMALIAAYVAVAVAEALLLVIKIQAKATSPEIRKEAEKVLKALEEIAKRILEALKRGDEEALFKAAKEANTAAEKAQKLLDETEKQ

SEQ ID NO: 3089 - protein, 274 aa, synthetic construct
  REGION 1..274: note = Synthetic
SMEAILLAQEVSELVTRAKRLVKEIKKRATSPEIREVAEKVAEFLAQIERTIREAARRGDEERLRMALLAAQVALLVAKALLLVTEIFEKATSPQIRRVAEAVLRILKAIAETLTQALQKGDEERLRMALAAAKVALLVAIALLLVTEIQKKATSPQIRRVAEAVLRILEQIARTILEALKRGDKDALKRALLAASVAVAVAEALLLVIKIQEKATSPEIREEAEQILRELEEIAKRILEALKRGDEEELFRAAEAANTALSKAQSLLDETEKQ

SEQ ID NO: 3090 - protein, 274 aa, synthetic construct
  REGION 1..274: note = Synthetic
STEMTVLALRVRLAVKLAKTLVTLIKKRATSPEIKEVAAKVEQFLKEIERTLEEALKRGDEERLRMALLAAQVAALVAKALLLVVEIQAKATSPKIRRVAEQVLRILKQIAETITQALKRGDEEALRMALLAAEVALLVAKALKLVTEIQRKATSPDIRRVAALVLALLEQILKTLLEALLKGDEERLRMAKLAAEVALLVAKALLLVTEIQANATSPEIREEAKKVLEALEEIAKRIFEALKAGDETRLAKAAVAAYLAASQAERLLTETRTQ

SEQ ID NO: 3091 - protein, 274 aa, synthetic construct
  REGION 1..274: note = Synthetic
SREMKAKAAEVYKLLLEASQIVLEILEKATSPDIQEVAKKVLKFLAAILKTIADALRRGDEEALRRALLAAQVALLVAKALLLVIEIQRHATSPQIRRVAKLVLRILKQILETLEQALKKGDEEKLRMALLAAEVALLVAKALRLVIEILKKATSPQIRRVAKLVLRILEQIARTLLEALEKGDEKKLRMAKLAAEVALAVALALAAVVWIQAKATSPEIREEAEAVLKELEEIAKKILEALKRGDEKALKEAADEARKALVKASLLLAETVAK

SEQ ID NO: 3092 - protein, 274 aa, synthetic construct
  REGION 1..274: note = Synthetic
SEEMKKTASKLDELVLEAFQLVHEIQEKATSPDIAEVATKVAEILKEILKTVEEALRKGDEEKLRLALLAAQVALLVAKALLLVTEIQKKATSPQIRRVAKQVLRLLKQIAETILQALKKGDEEALRMALLAAQVALLVAKALLLVIEILRKATSPEIRRVAEQVLRILEQIARTLLSALERGDEEALRMAKLAAEVALAVAAALAAVIWIQRKATSPEIREEAAKVLEELEEIAKRILEALKRGDEQKLKEAADEARKALKKAYKLTADTQSK

SEQ ID NO: 3093 - protein, 274 aa, synthetic construct
  REGION 1..274: note = Synthetic
SREMKSLAKEVMHLVLQAFFLVMKIREKATSPSILEVALTVLEILLAILKTIDEALKRGDEDRLRMALLAARLALLVAKALLLVIEIQRKATSPDIRRVAELVLRILKQIAETLRQALEKGDEERLRMALLAAEVALLVAKALLLVIEIFRRATSPDIRRVAKKVLELLEEIARTLLEALEKGDEKKLRLAKLAAEVALHVALALAAVTYIQEKATSPEIREEAKAVLEALEEILKRIFEALRRGDEQRLKEAAEEALKAAVTALALFAKTELQ

SEQ ID NO: 3094 - protein, 291 aa, synthetic construct
  REGION 1..291: note = Synthetic
SEELKFLAFSVKIALALAIETAEAIFRTLDRLNMPPDFKKALARIVEMAKKVAEFVQRALERGDEKALRLAHLAAKVLATLAAAIATVLEIIEILQRLNMPPEWFEAVKELVRMAAKVAQFVAEALERGDEKQLRLALLAAQVLYYLALAILTALRILEILKRLNMPPSWFEAVKQIVRMAAEVLKFVIEALERGDERQLRLALLAAQVLYYLALAIATALRIVEILQRLNMPPEYEKFVELIVKLAAEVAQEVVEALKRGDERQLKEALEKAKHLYESAQELLKLLEAKV

SEQ ID NO: 3095 - protein, 295 aa, synthetic construct
  REGION 1..295: note = Synthetic
SWEMLALLAAVLKLITKLEEILRKVEKKATDPEFRELAQWLKEFAAELLRIALEALKLANKDPDKAETLLRMVKLAAEVLVLAAQLLLILIEVKQKATDPEFREIAQKLLEILKELLEILAEALRLARKDPSKADKLLKMVKLAAEILVLAAQLLLILIEVKQKATDPEFREILQWLLEFAKELLEQAEEALRLADKDPDKAEFLLRMVIHAAHVLVAAAQLLLILIEVKQKATDPRFREQVQRLLEKAKRLLEQLEEALRLADKDPEKAKKLLTKVNFKALEAVFTALELLYQI

SEQ ID NO: 3096 - protein, 271 aa, synthetic construct
  REGION 1..271: note = Synthetic
SEEIAVLASKAWELYLKMLELSEELKRNVTDPEIERQLERATRFANKVLAKVEEALKRGDKDTAKIAVLLLEAVWYFLQMLKLSVQLKRKVTDPKIEEQLRQAEKDAEKALELLEEAAKRGDKETAQIAVLLLEALWYFLQMLQLSVELKRKVTDPQIEEELRQAEAFAEKALAFLREAAKRGDTTTAQIAVHLLAAVLLFLRMLQLSVALKRNVTDPRIEEQLRQAEKKAQKALEQLEEAAKRGDWTAAVEAQAQLIKVYVHLLKLQEEV

SEQ ID NO: 3097 - protein, 228 aa, synthetic construct
  REGION 1..228: note = Synthetic
SFELYLTAFEIQYYATQVLEIVYKYGLPESLLKIVELIHKLIQKALDTGDETSMRLALTAARIAYYAALVLAIVKEYGLPESLEEIVKTILKLVLEASRKGDEKSMRLALLAARIAYAAAQVLSIVKEYGLPESLLKIIKQILELVRSALKTGDEKSMALALAAAMIAVALAKVLAIVKEYGLPESLEKEVQEILEAVKRALETGDMSTMWQLLREASKAAIKALAQA

SEQ ID NO: 3098 - protein, 271 aa, synthetic construct
  REGION 1..271: note = Synthetic
TEEIEVLLRLAELARKDMQKLSEELKRNVTDPEIQRQLEEADRFAEKARKFIEEAAKRGDKETLAIAVHLLRAVWYFLLMLKLSVELKRNVTDPEIEEQLRQAEEEAEKALKRLEEAAKRGDKETAHIAVLLLKAIWYFLQMLQLSVELKRKVTDPAIEEELKKADEFAKKALRALREAAKRGDATTANIAVLLLEAVWYFLLMLQLSVALKRNVTDPRIEEALRQAETKARLALEWLELAAKRGDLDAAYQAVEMLRTVWEYLAELQKRV

SEQ ID NO: 3099 - protein, 271 aa, synthetic construct
  REGION 1..271: note = Synthetic
TEEIARLLEKALKAVEKMKELSTHLKKEVTDPEIERQLERAERFAEKALKAAAEAYKRGDKTTAKIAVLLLEAVWYFLLMLKSSVHLKRTVTDPEIKEKLRQAEEFAEKALEKLEEAAKRGDEETAHIAVLLLEAVYYFLLMLQLSATLKEEVTDPQIEEELRQAEEFADKAFAFLREAAKRGDTETARIAVLLLEAVYLFLAMLRASVALKRRVTDPTIEEQLRQLEKRAQKALEELEEAAKRGDESQAKAAVKELKKVRDELAALELET

SEQ ID NO: 3100 - protein, 173 aa, synthetic construct
  REGION 1..173: note = Synthetic
TEFSVAHAAFSAVEALIKASEAGDEELYKLLLTLLEKLEEMRKLGDPEKAAILAFVVHALAVAVEALIQARKAGDKELYELLKQLVEKLVEMINLGDPDKAEKLAAVVLALAAAVQALIKARKAGDKELYEYLKRLLEQLIEMINLGDPDKAVKLAVEVLEAAAKVALKAHKK

SEQ ID NO: 3101 - protein, 219 aa, synthetic construct
  REGION 1..219: note = Synthetic
SAEVKAALYFAAEAFKSLKKAGDEELARILKEFLERLKELEKRGSSEAKKLAEVVKALALAAQAFVLLKKAGDEELAKILRWFLEVLLELVRRGSDEALKVAEVLKAIASAAFAFVDLKKKGDEELSDILKKFLEYLLELLKRGSDEMLDVAEVVKAIAKAARAFAKLKDAGDEEDSETLRKFLERLLELLKRGSSEMKEVAATVRAIATLAETKLKIK

SEQ ID NO: 3102 - protein, 219 aa, synthetic construct
  REGION 1..219: note = Synthetic
SEQVAHAKKSAEKALEKLKEAGDEELVRILEAFLEILDELEKRGSEEMHEVAVVVAAIASAARAFLELKKAGDEELSKILKAFLEILLELLKRGSEEMLKVAFVVFAIASAARAFKALKEAGDSWLLDILQKFLERLLELVKRGSDEMLDVAFVVLAIATAARAFIKLKKKGDEEALQLLRSALEQLLELVKRGSSLRLATAAWVLELAEEAEAELRRK

SEQ ID NO: 3103 - protein, 219 aa, synthetic construct
  REGION 1..219: note = Synthetic
SESVKEALESAFQAVLELRLAGDEELARILAAFLATLLELEKRGSSAADKVAEVLKAIASAARARIALKEAGDEELAKILDWFLKVLLELLKRGSDEMLKVAEVVKAIASAARAFIQLKKAGDEELSDILKKFLEILLELLKRGSDEMLKVAEVVKAIAYAASAFLLLKLAGDSERSDELRKFLEKLLELVKRGSDAALEVARKLLEKAREALEEAVKK

SEQ ID NO: 3104 - protein, 219 aa, synthetic construct
  REGION 1..219: note = Synthetic
DEEVKKAFQSALEAAFELELAGDEELSRILYTFLATLAELAKRGSDAMKKVAEVLKALASAARAFLALKRAGDEELSKILKAFLEILLELLKRGSDEMLKVAEVLKAIAKAARAFIALKKAGDEELLKILQYFLEVLLELSKRGSDEMLKVAEVVKAIANAAMAFLLLKRAGDEELSQKLRRLLERLLELLKRGSDAMLEVAKKVAQTAQEAQWEAAKK

SEQ ID NO: 3105 - protein, 221 aa, synthetic construct
  REGION 1..221: note = Synthetic
TEREQEALELALRKLELQMDKVGDSRLATLVRKALKSAKEALESGDPRQIAEALRQIELAHRLLNLVLYMKKTGDERLKELVEEAIQRALEAFESGDPRDIEQALRQIELALRLLELELLMRETGDDRLKELVERAFQSAFEAHKSGDPRDIQTALEQIELALLLLRLEKLMQETGDSRLADFVEKAFESAKKAIASGDPRDITKALLEIKVALWTLEVAK

SEQ ID NO: 3106 - protein, 220 aa, synthetic construct
  REGION 1..220: note = Synthetic
KEEQARKVKSLMDFLEMAAKREGDEELQRLAKIALETAQQALETGDPRLLEKARLLLEVVLAMFLLLTALKKDGDEELLRIAKAALEKASKAIKKGDPRDLKTAKALLEVVLLMFELAQLLREIGDEELLRIAKRALEVASAAIKRGDPKDLELARQLLEVVLLMFKLQQLLEKSGDEALVKLAEAALRSASEAIKTGDPHKLEHALSNLKLVLKFFELT

SEQ ID NO: 3107 - protein, 220 aa, synthetic construct
  REGION 1..220: note = Synthetic
KEDQAIKVKVAMYFLKYAAKQEGDEELDRIAKRALEKAQQALETGDPRLLEEARELLEVVLAMFLLATALKKKGDEELTRIAKAALERASAAIKRGDPKDLKLAKLLLEVVLLMFELKDLLKEIGDEELSRIAKTALEKASEAIKTGDPSLLELARQLLEVVLLMFQLRKKLEESGDETHLKLAAYALKKASEAIKTGDPRKLEFAATLLKLVLASFKYK

SEQ ID NO: 3108 - protein, 227 aa, synthetic construct
  REGION 1..227: note = Synthetic
SVESALEVANAVAKALELLTQALEAGVDSRIIKKVLKFLYEALALTNKNDRKLQKILEVALRVAQAALLLAQAKKAGVDSRILELVMAFLREALELARKNDEKYKKIVQVALAVARAALLLAKAKQAGVDSRILELVMRFLFEALELVTKNDEKYQKIVWVASQVALAALLLAKARAAGVDSRKIEDVMRKLAEALELARKNTERYLDILAKALLAAVLALLEAQIK

SEQ ID NO: 3109 - protein, 220 aa, synthetic construct
  REGION 1..220: note = Synthetic
KEEQASKVKSAMTLLKYAAKVLGDEELDRIAKRALEKAQQALETGDPRLLEEARLLLEVVLAMFLLKIALEKSGDEELSRVAKRALEKASEAIAKGDPKDLKLAKLLLYVVLLMFELKQLLKEIGDEELSRLAKAALEKASEAIATGDPSLLETARQLLEVVLLMFRLRQLLEESGDETLLKFAAEALRSASEAIKTGDPSKLEHAATNLKLVLEWFKYF

SEQ ID NO: 3110 - protein, 220 aa, synthetic construct
  REGION 1..220: note = Synthetic
KEEEAAKVKSLMRILEYAAKRYGDEELDRIAKRALETAQQALETGDPRLLEKARELLEVVLLMFLLRTALEKEGDEELKRIAKRALEKASKAIAKGDPRDLKTAKLLLEVVLLMFELYALLREFGDEELSRIAATALEEASKAIKKGDPKDLEHARKLLEVVLLMFRLKKLLEEKGDETLLKLAEDALRTASEAIAAGDPTKLEQALSALKLILKFFKYT

SEQ ID NO: 3111 - protein, 220 aa, synthetic construct
  REGION 1..220: note = Synthetic
KEEELSKVKSLMTLLEMLAKKFGDEELVRIAKRALEKAQQALERGDPKDLEEARLLLEVILAMFALKAALEKYGDEELLRLAATALKKASEAIKKGDPKDLKTAKALLEVVLLMFELKQLLKESGDEELLRLAATALKKASEAIAKGDPKDLEHARQLLEVVLLMFKLYQLLRESGDEALLKLAEHALRTASEAIAKGDPSALEHALTNLKLVLKLFELF

SEQ ID NO: 3112 - protein, 220 aa, synthetic construct
  REGION 1..220: note = Synthetic
KEEQYLKVKVAMFHLKFAAEKVGDEELSRIAKKALEKAQEALERGDPKDLEHARLLLEVVQAMFELELALRKDGDEELSRIAKTALEKAKQAIAKGDPKDLKTAKLLLEVVLLMFKLAQLLREIGDEELLRIAKTALEKASQAIKTGDPRLLEEARQLLEVVLLMFQLAQLLKKKGDEVLVKFAEWALRVASEAIKTGDPKKLTFALMLLKMVLKSFEQT

SEQ ID NO: 3113 - protein, 220 aa, synthetic construct
  REGION 1..220: note = Synthetic
KEEETLKVAVAMYHLKYAAEKVGDEELTRIAKKALEKAQQALEKGDPKDLEHARELLEVVNAMFYLKDALKKEGDEELLRIAKRALEKASAAIAKGDPRDLKTAKALLEVVLLMFELKALLREVGDEELLRIAKTALEKASQAIKTGDPRLLEEARQLLEVVLLMFQLKKLLKEVGDEVLVKFAEYALRVASEAIKTGDPSKLTFALMLLKMVLKSFKQT

SEQ ID NO: 3114 - protein, 220 aa, synthetic construct
  REGION 1..220: note = Synthetic
KEEQLTKVEVAMFVLEFLAKKEGDEELDRIAKRALEKAKQALKTGDPSLLETARLLLEVVLAMFKLEKWLRKDGDEELSRIAKTALETASKAIATGDPSLLKLAKLLLEVVWLMFALAQLLREIGDEELLRLAKRALEKASQAIKTGDPRLLEEARQLLEVVYLMFQLKQLLKKSGDEVLVKLAEYALTFASEAIATGDPSMLEYALLLLKFVLELFKQT

SEQ ID NO: 3115 - protein, 220 aa, synthetic construct
  REGION 1..220: note = Synthetic
SLEELLEVLRLLHELAVLAAASGDEELVRIAKRALEFARQALEKGDPKDLEFARMLLTVVLLMFELKQKLKESGDEELLRIAKRALETASKAIKTGDPSLLKLALMLLYVVLAMFELKELLKEVGDEELLRIAKKALEEASKAIAKGDPKDLAHAAMLLWVVLLMFRLKQLLKEKGDEQLSREAERALRKASEAIKTGDPSLLWTAAQELHKVLVKFETK

SEQ ID NO: 3116 - protein, 221 aa, synthetic construct
  REGION 1..221: note = Synthetic
SAEETHKILQMLVAVRLALEKIGDERLKQVAQKAIEQATRALKKGDEELQEEAERQLHIALLMFRVVELLRKLGDSRLLEVAEQAIQFAYEALATGDEELQEEAARLLRIALLMFEVVELLRKLGDSWLSEVAEQAIQYAYEALQAGDEEKQQKAYMLLLIALHMFRVREALRKLGDEELKRTAQKAIEQAYRALQTGDDELLKKALYLLSLALKKFEEKK

SEQ ID NO: 3117 - protein, 221 aa, synthetic construct
  REGION 1..221: note = Synthetic
SSEETYRILVMMVKVRIALEKLGDSRLKEVAQKAIEQAERALKTGDEEEKEEAERLLKIALLMFRVSELLRKLGDSRLLEVAEKALQFAYEALLTGDEELQEEAARLLWIALLMFEVVELLRKVGDEELAQVAEQAIATAYEALERGDEEDQQKANTLLLIALLMFRVRELLRQLGDEELLREAQRAIEQAYRALQRGDEEDLTEAILRLLYALLKFETKK

SEQ ID NO: 3118 - protein, 234 aa, synthetic construct
  REGION 1..234: note = Synthetic
SFEIQSALFKLYVLLLEALKLLEKGVGEEAVRQLLRIIKKMLERLKSGKDAELILKIAEAVAQLVAVLLEAIRLIEAGVGLEAVEALLRIILEMLKQLEEGKDAEDILAIAHAVANLAKVLLKAIELLEKGVGKEAVRALLEIILEMLKRLLEGKDAEKILMIAQAVAILAKVLLKAIELLAKGVGLEKVAELLREILEMLKKLREGKDAEDILKQAFRVAAHAFLLLKEIEEK

SEQ ID NO: 3119 - protein, 196 aa, synthetic construct
  REGION 1..196: note = Synthetic
SERLKMSLDQAAEALARLKEAGVDPKALKLLEAIVREAKEKGDEELAKLAQTVANALLALVRAERAGVDPKALKLVWRIFIEALEKGDLELAKLAATVAEALLMLIQAARAGVDPKALKLLYRIVIEALEKGDSELAKLARTVARALLMVIKAERAGVDPKLLDAVIKLVIEALEKGDLSAAEFALKSAEALLKLV

SEQ ID NO: 3120 - protein, 234 aa, synthetic construct
  REGION 1..234: note = Synthetic
SFEITQAAFKLKLLAKRAKKLLEKGVGLEAVRKLLEIIAKMLERLKSGKDAEKILKIAEAVAQLAKVLLEAIKYIEKGVGEEAVKELLKIILEMLKQLEEGKDAEDILAIAHAVANLAEILLKAIELIEKGVGLEVVRQLLRIILEMLKRLLEGKDAERILLLAHAVAALAEVLLKAIELLEKGVGEEKVKDLLAKILEMLKQLLEGKDAEDILKQAHRVAAEAQLLLDEIAEI

SEQ ID NO: 3121 - protein, 234 aa, synthetic construct
  REGION 1..234: note = Synthetic
SELAAMALRALKEVLKKAEKLLEKGVGLEAVRQLLRIIKKMLERLKEGKDEEKIFAIASAVAALADVLLKAIELIAKGVGLEYVEQLLRIILEMLKQLEEGKDAERILHLAQAVADLAAILLKAIELLEKGVGEEAVRQLLDIILEMLKRLLEGKDAEDILRIAKAVAELADVLLKAIELIEKGVGEEKVKTLLELILTLLKKLRSGKDKELILFIATQFADMARKELKKIQEK

SEQ ID NO: 3122 - protein, 234 aa, synthetic construct
  REGION 1..234: note = Synthetic
SYLATLALKALKEVLAKAEAFEEKGVGLEVVRQLLRIIKKMLERLKEGKDEEDIFAIASAVANLAEVLLKAIELLEKGVGLEYVAELLKIILEMLKQLEEGKDAEDILRLAQAVADLARVLLKAIELLEKGVGLELVAELLRIILEMLKRLLEGKDAEDILRIAKAVATLAEVLLKAIELLEAGVGYEEVKTFLKQILTLLKKLLSGKDAEKILFIASQFASMAKKALKKIAEK

SEQ ID NO: 3123 - protein, 227 aa, synthetic construct
  REGION 1..227: note = Synthetic
STELTQILATILALLTLMEEAYKQTGDPQLEELIRRAQALFEEAKRSGDPTSVALALLLAKILALLAEMVLIWLALGDPQLEELIRKARELFEEARRSGDPKDVQLALVLAAILYLLALMVLIRNQTGDPQLEELIRKAERLFEEARKSGDPKDVNTALQLAEILYLLARMVHIYQKVGDPRLEELIRKAQRLFEEAQRSGDPKDVSVALAQARKLYKKAIQIALEK

SEQ ID NO: 3124 - protein, 227 aa, synthetic construct
  REGION 1..227: note = Synthetic
SEEAAKIFWTIVKLSEEMAKIAKKVGDPQLEELLKRANTLAEEAKKSGDPKDVKLALILAKILYLLAKMVEIYARYGDPALERLIRKARDLFAKARKSGDPKDVQLALILAAILYLLAEMVAIRNDVGDPQLEELIRKAEKLFEEARKSGDPRQVKLALLLAYILYLLALMVKIYRDVGDPRLEELIRKAQKLFEEAQRSGDPRSVKDALAKALFLAAEASLIAQKK

SEQ ID NO: 3125 - protein, 227 aa, synthetic construct
  REGION 1..227: note = Synthetic
SEEAAKIFWKILELSAEMAKIAKQTGDPKLEELNKRANTLAEEALRKGDPKDVALALLLAKILYLLAEMVLIYAKIGDPKLEELIRKARALFEEARRSGDPKDVRLALLLALILYLLAEMVAIWLKLGDPQLEELIRKAERLFEEARKSGDPKDVQLALALAWILYLLAFMVYIWAQTGDPRLEELIRKAQRLFERAKKEGDPRSVTTALIKALFLAFTAHLVHNKV

SEQ ID NO: 3126 - protein, 199 aa, synthetic construct
  REGION 1..199: note = Synthetic
DSREKKSEVVKKMVEEALSSIKTLIEYLEKAGWERIAKQIRAFLDQIARTLEAWEETGDERYLRSAWIIALVMQALAQIAALIDKLRAAGWEEIARQLEAFLQQIVETLEAWRETGDERYLRAALIIAQVMLLLAAIAEEIEKLEKAGWEQKAREIKKALQEIFETLQKWAETGDEAALETALFKAHQMLLTAKLARQK

SEQ ID NO: 3127 - protein, 199 aa, synthetic construct
  REGION 1..199: note = Synthetic
SESEKISKLVKKNVEKALREIKELIKKLEAAGWERIAKQLRKFLEQIEELLKAWRETGDSSALYSALLIANVMLLLAKIAEQIEKLRKAGWEEIARQLEAFLQAIFETLEAWFETGDKRYLNSAAILARVMSLLAKIAELIEKLEKAGWEQKARELKELLQEIVEVLKLYEETGDEAALLYALSLAEQMVREAEKARKD

SEQ ID NO: 3128 - protein, 199 aa, synthetic construct
  REGION 1..199: note = Synthetic
SESEAYSTLAKRYVEELLREIKELIKKLEAAGWEEIARQVRAFLEQIKETLEAWDETGDERYLRAALNIAEVMSLLAKIAFAIEKLRKAGWEELARKLEKFLQKIVETLEAWFETGDDRYLIAAAIIAQVMKLLLEIAELIEKLEKAGWEEAAKLVKALLDMIVKTLDAWFETGDERYLYFALQLAEMMSKIAETARKK

SEQ ID NO: 3129 - protein, 286 aa, synthetic construct
  REGION 1..286: note = Synthetic
SEELKFAANRVQLKAKKIKLALRDLLRIAEQDGDPQLEELIRIVKELAEQATQTAEKAKKTGDKELVALAEMLLDVAELALKIAFKLKELDKLVKEDGDPQLEELLQIVLELAIQALKFAQRATETGDMELVELALMLLKVALLAVEIAQALFELKKIAEEDGDPQLEELLQIVLELAIQALKFAQKAVEKGDKEKVLLALALLEVALLAVQIAQALKKLKKIAKEDGDPRLEELIQRVLELAIKALKQAQRAIEKGDLEEVNTALNLLLEALAQVKTALTEREQA

SEQ ID NO: 3130 - protein, 196 aa, synthetic construct
  REGION 1..196: note = Synthetic
SEELALLLRIAEHAVRQAKKAGVDPKALELVERIVQEAREKGDIELAKLAFTVAQALLALIRAARAGVDPKALRLVIRIVIEALEKGDSELAKLAATIAYALLMLIKAERAGVDPKALRLVIRIVIEALERGDRELAKLALTVARALLMVIKAARRGVDPKDLAAVIKFVIKALERGDLSAAEFALAIAKALLQNK

SEQ ID NO: 3131 - protein, 274 aa, synthetic construct
  REGION 1..274: note = Synthetic
SLEILEAASEALALLAKVLETINKVKAAAQSPQFEEIARRLEKLLKQVEKLLRRATKEGDLRKARIAILAARAALLIAQVLLTIIAVEAAAQSPQFEEIAQALMELIKEVIKLLLAAIEEGDERKAKIAILAAEAALLIAQVLLTIIEVEAAAQSPQFEEIAQKLMELIKQVIKLLKAAIKEGDLDKAKIAIHAANAALAIARVLLLIIFVLAAAQSPEFQEEAQRLLEEIKRVIELLLRAIEEGDWEAAVKAQYAAFLLLLEALKLATRIRET

SEQ ID NO: 3132 - protein, 274 aa, synthetic construct
  REGION 1..274: note = Synthetic
SEEILKLLLEALTLIEKVEKTIAKVEKAAQSPQFEEIAKRLRKLIKQVLELLHKASAEGDLHKAKIAILAARAALLIAQFLLTIIEVEKAAQSPQFEEIAQRLMKLIKDVIALLLRAIEEGDLRKAKIAILAAEAALLIAQVLLTIIEVEAAAQSPKFEEILQLLMELIKQVLALLKRAIEEGDLDKAKIAIMAARAALAIAKVLLTIIEVEAAAQSPEFEEEAQRLMEEIKRVIELLKRAIEEGDESKAVEAMLRAFHALLTAKTLLTRIREQ

SEQ ID NO: 3133 - protein, 274 aa, synthetic construct
  REGION 1..274: note = Synthetic
SERIEELAREAEDLLFKVALTIIQVLLAAQSPQFWEIATALMELLTKVKEILKRAKEEGDERKAKIAILAARAALLIAQVLLTIIAVEAAAQSPQFEEIAQKLMELIKEVIKLLLAAIEEGDEHKAKIAILAAEAALLIAAVLLQIIWVLANAQSPQFEEILQKLMELIRQVLALLKRAIEEGDLDKAKIAILAARAAYAIAALLQIIIAVEAQAQSPEFEEEAQRLMELIARVIDLLKRAIEEGDLRKAEEAYKAAVEAVFTAVKLLLKIFHQ

SEQ ID NO: 3134 - protein, 274 aa, synthetic construct
  REGION 1..274: note = Synthetic
SEEIAKLLKEAKMLIKLVKLALKSVETAAQSPQFEEIAKRLKKLIAQVEKLLKKAAEEGDLHKAKIAILAARAALLIAKVLATIIHVEAAAQSPQFEEIAQKLMELIKEVIKLLLAAIEEGDLSKAKIAILAAEAALLIAQVLLTIIKVEAAAQSPQFEEIAQLLMELIKQVLALLFRAIEEGDEDKAKIAILAARALLLIAKVLLTIIYVLAAAQSPEFEEALQRLLELIKRVIELLQRAIEEGDSDKAKWAILLAAFALEYAKLLAHLIDSQ

SEQ ID NO: 3135 - protein, 274 aa, synthetic construct
  REGION 1..274: note = Synthetic
SEDIAVAIKFAKWAIAAVKETIEKVEKAAQSPEFEEIAKRLKKLIKQVEKLLKEAREEGDKEKAAIAMAAAHAALAIAQVLLTIIEVAKAAQSPKFEEILRLLMELIKEVIKLLLEAIEEGDLDKAMIAIAAAHAALLIARVLLTIIEIEAAAQSPKFEEILKLLMKLIEQVIKLLKAAIKEGDEKKATIAILAARAALLIAKVLLTIIAVEKAAQSPEFEEEADKLMKLIYDVIKLLLAAIERGDEAALYIAVNLAEQALEKAKKLLTRIKEQ

SEQ ID NO: 3136 - protein, 274 aa, synthetic construct
  REGION 1..274: note = Synthetic
SELIDIAIKLAKKAIAKVKKTLAKVEKAAQSPQFEEIAKRLKKLIAQVEALLKRAREEGDLKKAAIAMLAANAALAIAQVLLTIIAVEKAAQSPQFEEIAQLLMELIKEVIKLLERAIEEGDEDKLLVANAAAEAALLIAQVLLTIIEILQAAQSPQFEEILQLLMDLIRTVLKLLKEAIKEGDKQKLTIAILAARAALLIAKVLLTIIAVEKAAQSPEFEETAQRLMKELKAVILLLQWAIEKGDEAAARMAVSAAKDALETAKRLLTRIKEQ

SEQ ID NO: 3137 - protein, 274 aa, synthetic construct
  REGION 1..274: note = Synthetic
SEEILFLALYAHQLITRVKETIAKVEKAAQSPQFEEIAKRLKKLIKQVEALLKRALEEGDEAKARIAVLAAQAALLIAQVLLTIIEVEKAAQSPQFEEILQALMKLIKEVIKLLLAAIEEGDEKKAKIAILAAEAALLIAQVLLTIIEVEKAAQSPQFEEIAQALMELIKQVIDLLKKAIEEGDEDKAKIAILAARALLLIAKVLLTIIAVEAAAQSPHFETAAQALLHVIAAVIALLQRAIEEGDLRKAEEAIRKAETALEIAKSLLAQIKKA

SEQ ID NO: 3138 - protein, 274 aa, synthetic construct
  REGION 1..274: note = Synthetic
SEELTWLILVAEQLIERVKKTIAKVEKAAQSPQFEEIAKRLKKLIAQVEKLLKAAAEEGDTKKARIAILAARAALLIAQVLLTIIEVEKAAQSPQFEEIAQKLMELIKEVIKLLLRAIEEGDEAKARIAILAAEAALLIAQVLLTIIEILAAAQSPQFEKILQALLELIEQVLKLLKAAIEEGDEDKAKIAILAARAALLIAKVLLTIIEVLAAAQSPHFETAAQALLYLIARVIELLQRAIEEGDLRKAEEAIRKAEEALEFAKSLLAALREQ

SEQ ID NO: 3139 - protein, 275 aa, synthetic construct
  REGION 1..275: note = Synthetic
SEELKEIAYAVRYMATAVRLLIHEVANKNSSDPQFRELFELAKELAKIAEELLEEAERRGDKSLAELALIALKVAYMALQVLKLIKEVYERNSSDPQFRELVELAIQLALEALRLLKEALEKGDKSLAELAAIALKVAYMALQVLRLIVKVYRQNSSDPNFRRLVELAIQLALEALRLLFEALKKGDKSLAELALIALKVAYLALKVLELIVEVLRRNSSDPQFRRLVAEAIRTAEEALEKLFEALKKGDKDKALAALEELLKAAHALYALLSRI

SEQ ID NO: 3140 - protein, 275 aa, synthetic construct
  REGION 1..275: note = Synthetic
SEELKTIAFYVRLIARLVEKLIAVVFAQNSSDPQFRELVELAAQLAKLAEELLEEAERTGDKSLAELAAFALTLALLALEVLNLIAEVKKQASSDPTFRELLELAIDIALKALRLLKKALETGDSSLAELAAIALQVAYMALLVLRLIVKVARANSSDPKFRRLLELAKQLALEALRLLKEALEKGDKSLAELALIALEVAYMALLVLELILEVYKQNSSDPQFRRLAKEAIDLALKALEKLKEALKKGDKKAAIEAWVALYWAYLLLNHLAQKV

SEQ ID NO: 3141 - protein, 196 aa, synthetic construct
  REGION 1..196: note = Synthetic
SYELVATVAEAVQMLKEAEKAGVDPKALKLVAAIVEEALKRGDEELAKLALTIARALLMLIRAARAGVDPKALRLVIRIVIEALEEGDLEKAKLALTVAWALLALIAAARAGVDPKALKLVYRIVIEALEKGDLELALLAWTIANALHALIEAKATGVDPRDLAEVERTVIEALERGDLELALAALLRAIDLLLKQ

SEQ ID NO: 3142 - protein, 275 aa, synthetic construct
  REGION 1..275: note = Synthetic
SETLKLSAWAVRAMARLVEELIKEVYARNSSDPQFRELVELAKELLKLAEELLEEAERKGDTSLLDLANIALEVAYMALLVLKLIKEVYDANSSDPKFRELVEDAIKIALTALRLLKEALERGDKSLAELAAIALKVAYMALQVLRLILKVYAANSSDPRFRRLVELAIEIALQALRLLKEALKKGDKSLAELALIALEVAYMALKVLELILKIERANSSDPQFRRLVETAIKVAEFALELLLEALKKGDKDTARAALSALKVAYKLLKSLESKL

SEQ ID NO: 3143 - protein, 275 aa, synthetic construct
  REGION 1..275: note = Synthetic
SETLKLIAWAVKAHARLVEELIKEVYARNSSDPQFRELVELAAQLAKKAEELLEEAERTGDESLAKLAAIALNVALMALKVLKLIHEVKAQNSSDPQFRELVELAIQLALKALRLLKEALERGDLELAELAEIALKVAYMALQVLRLIVKVYRANSSDPRFRRLVERAIQLALEALRLLKEALDKGDKSLAELALIALKVAYMALKVLELILKIERANSSDPEFRRLVEEAIKIAETALELLKEALKKGDKTAAEAALLALQAALELLKSLESKL

SEQ ID NO: 3144 - protein, 275 aa, synthetic construct
  REGION 1..275: note = Synthetic
DETLKLIAKAVKAHARLVEEAIKEVYARNSSDPQFRELVELAKQLLKLAEELLEEAERRGDEDLAFLALIALQVAQMALEILKLITDVHRAASSDPQFKELTELAIQLALKALRLLKEALEKGDKSLAELAAIALKVVYMAFQVLRLILKVKKQNSSDPAFRRLLELAIQIALEALRLLEEALAKGDKSLAELALIALKVAYMALLVLELIVKIYRANSSDPEFRRLVETAKDMAEAALELLKKALKTGDKLAALAALYALQAALKLLKALESKL

SEQ ID NO: 3145 - protein, 275 aa, synthetic construct
  REGION 1..275: note = Synthetic
SETLKLIATAVKQMARLVESAIKEVYKRNSSDPKFRELVELAKQLIKLAEELLEEAHRTGDESLALLALIALEIALMALAVLKLITEVYRAASSDPKFRELVELAIKLALEALRLLKEALEKGDKELAELAAIALKVAYMALQVLRLIVKVARANSSDPAFRRLFELAKAIALEALRLLEEALKKGDKELAELALIALKVAYMALAVLELILKVYRANSSDPQFRKLVKSAIKQAETALELLAKALKTGDKTAAEAALAALEAAYKALKELEKKL

SEQ ID NO: 3146 - protein, 287 aa, synthetic construct
  REGION 1..287: note = Synthetic
SLEEAVKVNAAVTEALAAAKMVLKALEKLGDSALTERIKELIERLERLLEELYRLLKQGNEEAARRLMKLIKVQAKVLYAAAEAARVLVSLAKLGDSEQYKRIKKLIKRLFELLRELEALLRQGNEEEAERLMKLIEVQATVLYAAALASQVLLSLKKLGDSELLKRIEELIKKLFELLEELEKLLRQGNEEDAERLMKLIEVLAKVLSAAAEAVQVLVELKKKGDSSLTAEIEKLIKKLFKLLEQLERLLRQGNEERAKELMLDILATAAHLEVAARTAKKALKEK

SEQ ID NO: 3147 - protein, 287 aa, synthetic construct
  REGION 1..287: note = Synthetic
KEEQLFALFKKASKVAVYVAQVAVELKKRGDPRLVEKLKELLDKIQELLEELEELAKKGDEEQFQALYQLIDLLIKAAYVMAAIAKIAAELKEAGDPRQVELLERLIDQILKLLKELEELFRKGDEEKFQRLYQLIELLIKAARVMAKVAQIAKALKAEGDPRAVKKLHELIKKILELLEELEELFRKGDEEAFQKLYQLIALLIEALEVMAFVLQIAYELEKAGDPRQVKRLRELIERIKQALDELEELFRKGDDERFQELAKRIAKLILEALNVAFAAYVEELKK

SEQ ID NO: 3148 - protein, 226 aa, synthetic construct
  REGION 1..226: note = Synthetic
SEEQEDEVTKIVKSFLRLVEELKKATDKDKLEEIKKRVAYAQKALEAVQLALEALKKIQEMLEQGKLSEEQFRRIEKIVQSLIKLALDLTRATDESQLEAIYQRVEYAITAIRAVKLALEALEKIQRMLEQGKLSEEQFKKIEKIVKSLIALALELTNATDKDRLQAIQEKVEEAIKAIEAVLRALETLREIEEMRQAGKLSEEQFRLAAKLVEIHIQQALERTAS

SEQ ID NO: 3149 - protein, 208 aa, synthetic construct
  REGION 1..208: note = Synthetic
SELLRTALLILLKIALEHAERQGDEEAIRKIRELLEKAANASSPEQLKKIFAQVWLLLLLLNLLELAQRQGDEEAIRRIEKLLEKAAKASSPQQLREIMEQVELLIKLLRLLEKAERQGDEEAIRKIRKLLEKAAKASSPEQLKEIMEQVALLDRLLKALEKAQRKGDEEAIKLIKKLLEAAAKASSPEQLRTIAYIVKVLEYLLESK

SEQ ID NO: 3150 - protein, 208 aa, synthetic construct
  REGION 1..208: note = Synthetic
TEELKTKLLQLLTSLLILAKAQGDEEAIRKIEELLEEAAKASSPEQLKKIMKQVELLLSLLKLLLKAQHQGDEEAIRTIEKLLEKAAKASSPEQLETIMDRVWLLISLLRALELAERQGDEEAIRKIRALLEKAAKASSPEQLLKIHTQVELLIALLQALEAAQRKGDESAIRTIEALLEKAAKASSPEQLTKILETILKLLAELVQK

SEQ ID NO: 3151 - protein, 208 aa, synthetic construct
  REGION 1..208: note = Synthetic
TEELKKELLIALKLLLNWARAQGDEEAIRKIEELLEEAAKASSPEQLKKIMKTVALLLELLRLLLKAQHQGDEDAIRFIEKLLEKAAKASSPEQLEHIMLQVRLLASLLRLLELAERQGDEEAIRKIRKLLKKAAKASSPDQLLKIELQVHLLIALLQALEAAQRKGDERAIRTIEELLEKAAKASSPEQLWKIHETVVKLLIELVQA

SEQ ID NO: 3152 - protein, 196 aa, synthetic construct
  REGION 1..196: note = Synthetic
DEEFKTLLTLAEEAVKMAKEAGVDPRALKLVQRIIQEARERGDLELAKLALTVAQALLAIRAAEKAGVDPRALALVKRIVIEALERGDSELAKLALTLAQALLMLIKAARAGVDPKALRLVIRIVIEALERGDLELAKFALTVARALLMVQEARRRGVDPKRLEQVIRIVIEALERGDELAARYAAFLANSMANYV

SEQ ID NO: 3153 - protein, 208 aa, synthetic construct
  REGION 1..208: note = Synthetic
TEELKKKLLQALTHALILAKAVGDEEAIRKIEALLEEAAKASSPEQLKKIMKQVELLISLLRALLKAQHQGDEEAIRRIEKLLEKAAKASSPEQLETIMDQVHLLLALLRALELAERQGDETAIRKIRKLLEKAAKASSPETLLKIHAQVTLLIALLQALEAAQRKGDESAIRTIEALLEKAAKASSPEQFTKILETILKLLAKLIQA

SEQ ID NO: 3154 - protein, 208 aa, synthetic construct
  REGION 1..208: note = Synthetic
TEELKTELLLRLKYALIAARAQGDEEAIRKIEALLEEAAKASSPEQLKTIMKYVELLISLLRLLLAAQHQGDEELIRLIEALLEKAAKASSPEQLEAIMRRVELLLDLLRALELAERQGDEEAIRKIRKLLEAAAKASSPEQLLKIKLQVQLLIHLLQALEMAQRQGDERAIRQIEELLEKAAKASSPEQLEKILEQILKLQYELVAK

SEQ ID NO: 3155 - protein, 208 aa, synthetic construct
  REGION 1..208: note = Synthetic
SEEKWFKLSESLQHALELAKRQGDEEAFRKILELAEAALKASSPEQLEKIMKQVELLISLLRLLELAQRQGDEEAIRRIEKLLEKAAKASSPEQLEEIMTQVKLLIKLLRALELAERQGDEEAIRKIRKLLEKAAKASSPQQLKEIALQVMLLEQLLKALEMAQRKGDESAIRKIEELLEKAAKASSPEQLRKIAKEVAKLAFELIEK

SEQ ID NO: 3156 - protein, 208 aa, synthetic construct
  REGION 1..208: note = Synthetic
SEEKFETLLILLKLALESAERQGDEEAIRKIRELLEKAAKASSPEQLEKIMKQVALLQSLLNALRLAQRQGDEEAIRRIEKLLEKAAKASSPEQLEEIMELVALLLSLLLALMKAERQGDEEAIRKIRKLLEKAAKASSPQQLREIMEAVRLLLSLLEALELAQRQGDESAIRTIEALLRKAAKASSPLQFFKIALTVSQIALELKLK

SEQ ID NO: 3157 - protein, 208 aa, synthetic construct
  REGION 1..208: note = Synthetic
REEKLRKLLKKLFHALHLAHRQGDKTAADAIAKLLEKALKASSPEQLEKIMKQVELLISLLRLLELAQRQGDEELIRRIEKLLEKAAKASSPEQLEEIMTRVELLILLLRALELAERQGDEEAIRKIRKLLEKAAKASSPEQLKEIYTQVFLLAILLQALEAAQRAGDERAIRTIEELLEKAAKASSPEQLNKILKTVVTLAAELHAK

SEQ ID NO: 3158 - protein, 208 aa, synthetic construct
  REGION 1..208: note = Synthetic
REEKKHELLLKLFHALELAKRQGDKTAATAIAELMEKALKASSPEQLEKIMKQVDLLISLLRLLELAQRQGDEEAIRRIEKLLEKAAKASSPEQLEEIMKRVKLLIALLRALELAERQGDEEAIRKIRKLLEKAAKASSPEQLDEIWTQIQLLATLLKALAAAQTAGDERAIKQIEELLEKAAKASSPEQLKRIQTTVVKLFAELAKK

SEQ ID NO: 3159 - protein, 208 aa, synthetic construct
  REGION 1..208: note = Synthetic
REEKRTELLKALFHAAHLAQKQGDETAAKAIAEMLEKALKASSPEQLEKIKKKVDLLISLLRLLEEAQRQGDEEAIRRIEKLLEKAAKASSPEQLEEIMEQVKLLLDLLRALELAERQGDEEAIRKIRKLLEKAAKASSPQQLREIATQVTLLAILLLALENAQRAGDEDAIREIEKLLEKAAKASSPEQLRRIYKKIVDLLAKLSKK

SEQ ID NO: 3160 - protein, 208 aa, synthetic construct
  REGION 1..208: note = Synthetic
SVTEYLKLLSSLMHALELAERQGDEEAIRKIRALLEAAYKASSPEQLKKIAKQIELLISLLRALELAQRQGDEEAIRRIEDLLEKAAKASSPEQLEKIMALVALLIALLRLLELAERQGDEEAIRKIRKLLEKAAKASSPEQLKKIMNAVSLLIMLLKALELAQRKGDESAIRTIEALLEKAAKASSPEQLAKIATTLLKLMAELKKK

SEQ ID NO: 3161 - protein, 220 aa, synthetic construct
  REGION 1..220: note = Synthetic
TEEEFALVFYLLSAISAAAALKRLYEESGDPRAKELFERLKELLKRVRETLQKDPRKAKKLLELLEYLARAARALVTLWKLYKESGDPRAQKLFELLVELMKQVLETLKKDPRNASKLLEILKVLASAAEAAVTLWRLFKESGDPRAQELFERLVELMLQVFETLHKDPEKAKKLLRLLERLAAAARAAVWAAKSAEKNGDPTAKKLFETLVELMKEKID

SEQ ID NO: 3162 - protein, 220 aa, synthetic construct
  REGION 1..220: note = Synthetic
DEETATLVNKLMSAVAALAALKKLFEESGDPRAKELYERLKELLERVKETLNKDPRKAKALLEILEYLARAARAAVDLWKLYKESGDPRAKKLFEQLVKLMEQVIETLHKDPRKARKLLEILKYLASAAKAAVTLWRLFKESGDPRAQKLFERLVELMEEVIETLQKDPSKADKLLELLEWLAQHARNVVTAAKVAEKSGDPFAEELFKTAVKLMEDKLK

SEQ ID NO: 3163 - protein, 201 aa, synthetic construct
  REGION 1..201: note = Synthetic
DEELDEMVKKLFKQAEETAKNGDYDKALALLAIALIASEAAKSVEELEKAGFDSELLELVIKLLIQALKTAFNGDLDKARKLATIALIAVQAAKIVFELQRAGFDSELLEMVIKLLIQALKTVRNGDSSKAQKLAEIALMAVAAAKKVFELQKAGFDSSKLAKVIKLLIKALKTVRNGDATKAEFAARYAVFLVSQLEKEY

SEQ ID NO: 3164 - protein, 220 aa, synthetic construct
  REGION 1..220: note = Synthetic
TEEELALMAYTASASAAALTLEKLFDESGDPRAKELAERLEELMKRVEETLKKDPRKARELLEILEYLARAARAAVTLWELYKESGDPRAQKLFEALVELMKQVIETLQKDPRKAKDLLEILKVLAEAAEAAVTLWRLFKRSGDPRAQKLFERLVELMEEVLETLQKDPSKAKKLLELLKYLALAAKQVVLMWEAYARKGDPTAKEKFEKAVEDMERELK

SEQ ID NO: 3165 - protein, 220 aa, synthetic construct
  REGION 1..220: note = Synthetic
SEEEAKLQNYLTSAYWAALMLLLLARDSGDPRAKELFERLKKLMERVAETLQKDPRKAAKLLEILEYLARAARAAVALAKLFKESGDPRAKKLFELLVELMKQVIETLQKDPRKARELLEILKALASAAEAAVTLWKLFARSGDPRAQKLFERLVELMEKVIETLNKDPSKAKKLLHLLKNLATAARAAVTFWKDAEKSGDPFARKIFEKAVEYMERQIK

SEQ ID NO: 3166 - protein, 220 aa, synthetic construct
  REGION 1..220: note = Synthetic
DEKEVKLYVALMSATQAAQALKRLYKESGDPRAKELAERLKELMERVKETLQKDPRKADELLEILDYLARAARAAVKLWELYKESGDPRAKKLFELLVELMKQVIETLQKDPRKARALLEILKYLASAAEALVTLWRLFKRSGDPRAQKLFERLVELMEQVLETLNKDPEKARKLLLALELLAEAARYAVTQWEQYERSGDPTAAETFEKAVEEMERKID

SEQ ID NO: 3167 - protein, 204 aa, synthetic construct
  REGION 1..204: note = Synthetic
FEELATAVFEALLELLKLATEAGDSKAQEIFKEAVAALEEGDERKLKHVLRLIEVAKALIELKREAEKRGDELAKEILRQAKAALEEGDERKLEHVLLLIRVAKEMIALERLAEEEGDSRAQRILEEAKAALEEGDERKLKRVLLLIKVAKKMIELARLARKAGDEDAERILKEAAKALEEGDEAKLRAVYLKIVQALLKIKAT

SEQ ID NO: 3168 - protein, 204 aa, synthetic construct
  REGION 1..204: note = Synthetic
SEELEQKVYLLLLLLEVAATSAGDKLAEAILREAEQALREGDERKLKRVLLLIAVALALIKLKTAAERAGDELAKEILKKAKQALKEGDERKLKHVLLLIRVALKLIELKRLAEEAGDELAQRILEEAKAALEEGDERKLKRVLLLIKVAVAMIKLERLARKAGDEAAKKLLENAKKALEEGDESKLKTVLSAIKEFLKMIKTT

SEQ ID NO: 3169 - protein, 204 aa, synthetic construct
  REGION 1..204: note = Synthetic
SEELLLKVYHAALLLAILATHAGDELAKQILREAEQALREGDERKLKRVLLLIKVAATLIKLKEEAERAGDEQAEEILRQAKRALKEGDERKLKRVLLLIRVAKAMIELARLAEKAGDEKAQRILEEAKKALEEGDESKLKRVLLLIKVAKSMIELERLAREKGDEAAKKALASAEEALEKGDEKQLKIVLSVIAEAAKIIQHR

SEQ ID NO: 3170 - protein, 204 aa, synthetic construct
  REGION 1..204: note = Synthetic
SHETLNKVAEALIELFKLAKEAGDELAEAILREALQALAEGDERKLKRVLLLIEVAKAMIELKREAEKAGDELAKEILKQAKAALKEGDERKLKRVLLLIRVAKALIELARLAKEAGDEKAKRILEEAKAALEEGDEDKLKRVLHLIKVAKAMIELARLAKKAGDEEAKRILEEAEQALEEGDTTKLIYVLVLIKLAATKIKEK

SEQ ID NO: 3171 - protein, 204 aa, synthetic construct
  REGION 1..204: note = Synthetic
HQELATAVAEALIELFKLAREAGDELAEAILREALQALAEGDERKLARVLLLIEVAKALIELKREAEKAGDELAKEILKKAKAALEEGDERKLKHVLLLIRVAKALIELARLAKEAGDELAKRILEEAKAALEEGDERKLKRVLLLIEVAKAMIELKKLAKKAGDEDAKRILEEAEKALKEGDETKLTYIAVLIKLAKTSIKQK

SEQ ID NO: 3172 - protein, 201 aa, synthetic construct
  REGION 1..201: note = Synthetic
SEELKELMTHIKALLMIAELLGDEELEKLAREALETVAQGDYERAQRLAQIINLMIKIILLLNKAKELGDEELQKFAREALETVKQGDYERAARLLELIKLMVEIIRLLKEAEKLGDEELQEFARQALETVKQGDYERAKRLLELIQLMVKIIQLLQQAKRLGDETLQELARLAKEAVKQGDYETAAFLLEFIKHAVEKKK

SEQ ID NO: 3173 - protein, 201 aa, synthetic construct
  REGION 1..201: note = Synthetic
DRELKKLKRAIKAHLMLAKLLGDEELQQTAREALETVAQGDYERAQKLLALINLLLQIILLLEVAKELGDEELQQRAREALETVKQGDYERAARLLELIKLMVEIIRLYKEAEKLGDSELLEKARQALETVKQGDYERAKKLLALIELMVKIIKLLQQAKKLGDSTLVELARLALEAVKQGDYELAKNLLWFIKFAVEKAA

SEQ ID NO: 3174 - protein, 201 aa, synthetic construct
  REGION 1..201: note = Synthetic
DEELEEMVKKLQAKAKETAKRGDLSKALKLSKIALIALEAALTVEELEKAGFDSELLEMVIKLLLQALKTADQGDLDKALKLAEIALIAVQAAKSVFELQRAGFDSELLELVIKLLIQALKTVRNGDSSKAEKLAEIAAMAVKAAKSVFELQRAGFDSQKLEEVIQTLIKALKTARQGDLDKAYFLASLALSTVLQLKKER

SEQ ID NO: 3175 - protein, 208 aa, synthetic construct
  REGION 1..208: note = Synthetic
SWLKKAILELARRALELAERAGDEDAIRFVAALIEKVANARTPQEMLELTQQLYIIYLALRALLLAQKAGDEDAIRFVEKLIKKIVNARTPEEMKSLEDWLKIIYLALRALLLAQEAGDEDALRFVAKLIKKIVNARTPQEMRELEEELKIIYLALHALLLAQRAGDEEAERFVKELIKQIVNARTPEEAKHALLLLKMLATLLEKKL

SEQ ID NO: 3176 - protein, 212 aa, synthetic construct
  REGION 1..212: note = Synthetic
REEEIKEAEVALRFAEKAVKDAGDEELRKLIEELKRQLEKNPDDPRQIERILRIAHAILALIVAQQAVKEAGDEALRQLIAELIRQLTANPDDPRQIERISAIAKAILMLIEALKLVKEAGDEDLRKLIEELIRQLVANPDDPRQIERILRIARAIIMLIRALKYVKKAGDETLAQLIKIHIKQLVANPDDPRQIETILTNAWLIIWFIEQK

SEQ ID NO: 3177 - protein, 211 aa, synthetic construct
  REGION 1..211: note = Synthetic
TETLLKIVLLMLKLAAKAAAEAGNEEIAEWLKKLMEEIAKASSPEQIRKLALLASVLLHLILAAAAARDAGNEEILEYLARLMKEVAKASSPQQIRELQELAAVLAILIAAAAVARQAGNEEILEILARLMKEVAKASSPQQIRELKELAEVLLTLIEAAKAARDAGNEELLETLKRMMKQVAKASSPEEIRLLASLAQAAAFLIKREVQK

SEQ ID NO: 3178 - protein, 211 aa, synthetic construct
  REGION 1..211: note = Synthetic
TEELLMEVLHILLNAVELALKAGNKEIAKALYKLLKEVRKASSPEQIKELKELAEVLLILIQAAYHARQAGNEEFLEFLERLMKEVFKASSPEQLRELKELAEVLLTLIQAAWHARQAGNEEILEILDRLMKEVANASSPEQIRALKELAAVLAHLIRAAAVAAKAGNEEILEKLKRLMKQVAKASSPQEIRELLKEAVELAIEIFYAAAV

SEQ ID NO: 3179 - protein, 211 aa, synthetic construct
  REGION 1..211: note = Synthetic
TQEEQQEVIEILLKAVEYALKAGNEEIAKALYELLLEVQKASSPDQIRKLKELAEVLLILIQAAWHARQAGNEEILEILERLMKEVLKASSPEQIRKLKELAEVLLTLIQAAVLAREAGNEEFLELLKRLMEEVAKASSPEQIRALKELAWVLYVLIAAAVVAYKAGNERILEKLHRLMEQVAKASSPQEIRELAREATELAIEIYYQAAK

SEQ ID NO: 3180 - protein, 211 aa, synthetic construct
  REGION 1..211: note = Synthetic
TSLLALEVLMTLMSALAAAEYAGNEEILEILKRLLEEVAKASSPEQIKELKELAEVLHILIAAAAHARDAGNEEILEILERLMKEVAKASSPEQIRKLKELAEVLLTLIQAAEIARKAGNEEILEILERLMKEVAKASSPEQIRKLAMLAKVLLTLIEAAYHAARAGNERILEKLQRLMKQVAKASSPEEIAKLYAEASRLALQIKKEASA

SEQ ID NO: 3181 - protein, 206 aa, synthetic construct
  REGION 1..206: note = Synthetic
DSELKESIKFLEKIYKAAVLWAATKGDPLAKQLMKLAKAAVELLKLGDYERAQRLLALAELILTLLSIYYFAAEWYKRTGDPLALLLMELAERAVKLLANGDYERAEKNLKLAEAILDLLRIYEKAERWYRRTGDPLALRLMKLAEKAVKLLALGDYEAAAKLLELARTILKLLEWIEKAERTYKKTGDPAALFNAIVAYLRIESI

SEQ ID NO: 3182 - protein, 264 aa, synthetic construct
  REGION 1..264: note = Synthetic
TEEDIKELISEAEQAIKALEKLANSGDERSAKIARELVKILKEIIERIKKLLMKDPRKAAELADIARLIVAAAKAIYYLLLLSKSGDSRSAEIARKLVEILVQIIRKIAELLNKDPRQAKKLAKILELIVEAARAIFELLFLSMSGDSRSAEIARKLVEILQQIIEKIRELLMKDPSKAYTLALILAHIVAAARAILKLLKLSQSGDSRSAARARELVKRLLAIIKAILELLMKDPRQAYKAAVKLAEAVTEAAATYYKLLLEK

SEQ ID NO: 3183 - protein, 221 aa, synthetic construct
  REGION 1..221: note = Synthetic
REEENIKTALLILEAAELAAKAGDEDLLRFIHALVWELLKAADEGDSEKLKRVAKNIKTMKLIAKALILAQKAGDSKLFEAIRRLAEELLKAIKEGDEEKLDRVARNIHLMSLIAAALILAKEAGDEELYRVIARLVEALLRAQEEGDEEKLKRVYFNIVLMYMIAFALKAAKEAGDERFFEKVKRLVKKLLEAQEEGDEEKLKRVWKEILLMATAALLQK

SEQ ID NO: 3184 - protein, 221 aa, synthetic construct
  REGION 1..221: note = Synthetic
SFEKAAAVQDMLAAIFWLAREIGDSRFIEQAERLQEKASEAQKRGDEEALKKLLRLIEVLYQLLQIYLLALELGDSRFIEQAERLFEEAVEALERGDEEDLEKVLRKIEVLYALLLIYKLALEAGDEQFIRYAEELFEKAQEALKRGDEEALKKVKSSIKVLYLVLLIYLLAQRAGDEQLIREAEELFEKAREALERGDEKTLLKVYSQILKLYLALRQRL

SEQ ID NO: 3185 - protein, 201 aa, synthetic construct
  REGION 1..201: note = Synthetic
DEELEEMIKKLLKQAADTAKKGDLEKALALWKIAAIAEEAAEDVKELEKAGFDSELLELVIKLLIQALKTVRNGDSSKAQKLAEIALIAVKAAKTVYELQRAGFDSELLEMVIKLLIKALKTIHNGDYEKAELLALIAAAAVSAAKKVFELQKAGFDSSKLEEVIKLLKKALKTLFNGDLTKAFALAIEAQVRVTELAEEY

SEQ ID NO: 3186 - protein, 226 aa, synthetic construct
  REGION 1..226: note = Synthetic
SEEQASLYLHLLELAWKIFVIVAELGDPELLKQVAELLRELTEAAKEGDEKKLKLIALMLKVIYLAAQILRLLKELGDPELFKQVKELLERARKAQEEGDERKLKLILLMLKVIYLAARILLIIKELGDPKLEELVKELLRQAKEALEEGDESKLKLILLMLRVIYLAANILRLAAELGDPELSEKVEELLAQAKAAQEEGDEDKLKKILVKLYKIALTAWLEAHR

SEQ ID NO: 3187 - protein, 221 aa, synthetic construct
  REGION 1..221: note = Synthetic
SEEKENEMEAWLLTILFLALLAGDEQLRKAVKELFEAFKRAKKEGDERTLEEVLRQAKMLSALARIFVLAKKAGDERLEELVKELTQRFFEARKKGDESTLKKVAHLARMLAALARIFEAARRAGDSRLEEQVSQLTQQFLEAQRKGDESTLQEVAHQATMLSALATIFELAKRAGDSRLEAKVRELTERFLRARSEGDEKTLKEVLEKAIALAAEAHAEV

SEQ ID NO: 3188 - protein, 221 aa, synthetic construct
  REGION 1..221: note = Synthetic
SEERLKEMEYALTVIELHAKLAGDSQLKQTVKELQEQFERAKKEGDSRTLEEVLRQAEMLILLAAIFVLAKKAGDSRLKEQVERLTQRFKEAREKGDEKTLEEVYRQAEMLHLLAAIFALAKQAGDSRLLEQVSQLTQQFLEAAKKGDESTLEEVYRQAEMLSWLARIFVLAKQAGDSRLEAKVRELTERFLRAREEGDESTLETVLTQAKILSEVAANAV

SEQ ID NO: 3189 - protein, 220 aa, synthetic construct
  REGION 1..220: note = Synthetic
SELEKEVLRLVEELQELAAKAGDKKDLTLVLKLARKVAEALRAGDEEKLKKAKLALEVLILLLRLEELARKSGDSKDKESLRKLQKEILKALEAGDEDKLKHALLALEVLILVLRLIELARKSGDEQDERLMRTLQEEVLRALEAGDEEKLKDLLLKLHVLLAVLKLEELARKSGDEEDKRRLEQLKRELAEALEAGDKSRLKKLAAKFHVLYAELLVSK

SEQ ID NO: 3190 - protein, 220 aa, synthetic construct
  REGION 1..220: note = Synthetic
SEEASLMSYKVQRVLALAKKAGDEAAIELAKELIERFEQAQKEGDPRKIQEVLELLAQLYEVLQVLALAQEAGDEEAIKLAEELIKRFIQAVKEGDPRKIQEVLELLRQLYEVLQVLKLAQEAGDEEAIKLAEELIRQFIQAVKEGDPRKIKEVLLALRLLYIVLAVLKLAQEAGDEDAIRKAEELIRQFIQALKEGDPRKLNEVFQELLKLMAELERKK

SEQ ID NO: 3191 - protein, 220 aa, synthetic construct
  REGION 1..220: note = Synthetic
SHKEAQAQTIVEMVLKLAEEAGDEKAIELAKELIERFEQALREGDPRKITEVFELLLQLFEVLLVLLLAQYAGDEEAIKLAEELIKRFIQAVKEGDPRKIQEVLELLRQLYEVLAVLALAQKAGDEEAIKLAEELIRQFIQAVKEGDPRKIQEVLELLRQLYEVLLVLKLAQEVGDEDAIRKAEEQIKTFIQAVKEGDPRLIKLVLWSLRVLKFKLELKK

SEQ ID NO: 3192 - protein, 221 aa, synthetic construct
  REGION 1..221: note = Synthetic
QEEESWTALSLIATVLFLVARAGSKKLAKLALELAKRLARANATNDESQLEQIIRQAKALMLIAHVFELVKRAGSEKLRQLAEELLRRLEEALATNDESKLEQLYKQALALMVIARVFELVKKAGSEELRELAKRLLKRLEEALKTNDEEKLKQIYNQALALYLIAAVFLMLKEAGSEELREAAEKLLKELKEALATNDEEKLHKIFTKAVVLAAKAAVAK

SEQ ID NO: 3193 - protein, 221 aa, synthetic construct
  REGION 1..221: note = Synthetic
TEDEQREAELTITAVKYLVKHAGSEKLRKLAEELERRLEDAKKTNDEEKLEQISRQAKALFLIAYLTSLLKAAGSEKLRQLAEELLRRLEEALATNDEDKLEQILRQAKALILIAELFLLLAHAGSDELRELLQRLLERLEEALATNDEKKIEAILQQAKALMLIAAVTRLVKEAGSEELREKAEKLLKELKEALATNDESKLAEIYAKALALAIHAKTAK

SEQ ID NO: 3194 - protein, 224 aa, synthetic construct
  REGION 1..224: note = Synthetic
SEKFEVALAAAKTALTLAKKAAAEAGSEDMLELIRKVEEALKELEKKGDERKLEFVLQIAKAIFALALAYAAAAKAGSEQMLKLIKEVLKKLEELFNTGDERKLKFVLAIAEAIWFLANAYEAAARAGSDEMLKLIKDVLKALQELVKKGDERRLKFVLKIAKAIYFLARAYELAKRAGSKELLDKIKEVLEKLKKLFEAGDEAKLEAVLLTAKFIFQKAKNEE

SEQ ID NO: 3195 - protein, 252 aa, synthetic construct
  REGION 1..252: note = Synthetic
SEEEKEKATELIQRALELVKRISKKFPEEEAKAFAQILATLLRALLEALQRGDEEAIRKVAKLLKALLLILEASELVERIKQYFPEEEAEKFEQIMQDLLEKLYQATKRGDEEEIRKVSTLLKALLLILRASEYVQRIKEKFPEEEAEKFEQIMQTLLRRLYEATKRGDEEEIHKLLTLLYALLQILDASEVVQEIKEKFPEEEAEEFERKMQELLRRLYEATKRGDEETIRKVSEKLTELQVELYDSEAKK

SEQ ID NO: 3196 - protein, 221 aa, synthetic construct
  REGION 1..221: note = Synthetic
SEILALLLEILITNAKKAAARSGDEESRDLVRKIEETAKEAIAEGDPDKIATAVLMAKLINFLIAAIEHARRSGDEESRDLVKKIKEKASEAIAEGDPSKIRRAILMAQLIILLIRAQEHARRSGDEESRDLVKKIFEKASEAIKEGDPRKIAEAILMAQLIIFLIRATEHARESGDEKSRQLVKRIKEMASTAIKEGDPSKIKALIELARLIIKSIRETK

SEQ ID NO: 3197 - protein, 212 aa, synthetic construct
  REGION 1..212: note = Synthetic
STEKELYKTHAKLVVKLAESQGAGAETARKLLERLKRAIKEGDSEKIEKIKRLLEYLLEALWVVTAARANGAGVETAEKLFQRLLEAIEEGDSSKIEKIYQLLRYLLEALAVVATARENGAGVETAEKLLERLLEAIEEGDDDRIKKIYRLLRYLLFALEVIKTARDNGAGVEKAEDLFRKLLQAIEEGDEKKIQKIAAKLTLLAFELMNRR

SEQ ID NO: 3198 - protein, 221 aa, synthetic construct
  REGION 1..221: note = Synthetic
SLEKAQELSNLLTEALKHAKRSGDEESMKLVEHIFRTAVEAMREGDPSKIERAILMAELIIFLIRAIEHARRSGDEESRDLVKKIFERASEAIKEGDPSKIKKAIAMARLIIALIRATEHARRSGDEESRKLVKRISETASEAIKEGDPSKIATAAMMANLIAALIQAKEAAERSGDEESRKKVKEIAEKASEAIKEGDPDKIAKAAADALLLLVEIAKKE

SEQ ID NO: 3199 - protein, 221 aa, synthetic construct
  REGION 1..221: note = Synthetic
STEKALELFELLNKALEHAKRSGDSESMKLVEHIFKTAAEAIKEGDPSKIELAILMAQLIILLIRAIEHARRSGDEESRKLVKKIFEEASAAIKEGDPDKIKKAILLAWLIIALIRAIEHARRSGDEESRQLVKKIFEFASEAIKEGDPSKIAHAAMMALLIALIIQAKEAAERSGDEESRKKVKEISEKASEAINEGDPDKIAKAAAEAMLLSVEIAKKE

SEQ ID NO: 3200 - protein, 221 aa, synthetic construct
  REGION 1..221: note = Synthetic
SLEDALELFELLNKAQKHAKKSGDEESMKLVEHINKFAAEAIKEGDPDKIRLAILMAKLIILLIRAIEHARRSGDEESRQLVKKIFEFASEAIKEGDPSKIKRAILMAWLIIALIRAVEHARREGDEESRKLVKKILEFASEAIAEGDPSKIALAAMMALLIALLIQAAEAAKRSGDEESRKKVKEIKEKASEAIDEGDPSKIAKAAAEALLLSLEIAKKE

SEQ ID NO: 3201 - protein, 221 aa, synthetic construct
  REGION 1..221: note = Synthetic
SAEKLLELSEALEKALRHAKRSGDEESMKLVEHIFRYAAEASREGDPDKIETAILMAKLIIFLIRAIEHARRSGDSESRDLVKKIFERASEAIKEGDPSKIKKAIAMAWLIIALIRAIEHARKSGDSESRDLVKKIFEKASEAIKEGDPDKIAKAALLALLIAALIQAKEAAKRSGDESARQKVREIFEKASEAIKEGDPDKIRKAHADAMTILVEIAKKE

SEQ ID NO: 3202 - protein, 220 aa, synthetic construct
  REGION 1..220: note = Synthetic
SEREATKLTLAIMLAEAAARQLGDKRFEELVKKVTKRAKEAKKRGDPSQIAKAILLFKLILMLVTARDAAAKEGDSTFKELVKAILRRAKEALERGDPSQIKHAIALFELLIMAVEAREYAKQLGDSRFEELVKEVEKRAEEALRRGDPSKIALAIHLFELIIMAVQAKQKAKEKGDEADQRKVEEVQRKAEEALKRGDPEQILKAQVAFWLIIHELKKK

SEQ ID NO: 3203 - protein, 220 aa, synthetic construct
  REGION 1..220: note = Synthetic
SEEESTTAKLLLLNAAAAAKDAGDEETRRVIKELKEQLEEAQRNNDPSEIKRVILILRAFNLMLTAEKLAREAGDEKTRRTIAELKEELLRAYRNNDPREIKRVILSLEAFIQMLKAEKLAREAGDEQTRRTIARLKEELLRAHANNDPDEIKRVILFLRALILMLKAEKLARKKGDEDLKRLIDELKEQLLRAFDNNDPDAIKRVIKILKKLIESLETK

SEQ ID NO: 3204 - protein, 222 aa, synthetic construct
  REGION 1..222: note = Synthetic
SVELALAEAALAYAEAALEYLKANGDEELVRLLEKVLRTVREMQEKDPRQALELAKAIYALAVAFLALVNLKKNGDEELYELLKKVLELALEMLDKDPRAFLELAKAIELLAEAVLALLELKKNGDEELFELLKQILEKAFEMFEKDPRTALLIAWAIAALAEAVKALIELKKNGDEELFRKLEEELKKAIEMVDKDPRKALEAAAKIQMTAHQVKQRLDEK

SEQ ID NO: 3205 - protein, 222 aa, synthetic construct
  REGION 1..222: note = Synthetic
SVELALAEFYLVYAELALENLAANGDEELFRLLEHLLKKVREMQEKDPRQALEFAKAIYALAVAVLALINLKKNGDEELFELLKRVLETVVEMFDKDPREALRLAAAIEALAEAVQALIELKKNGDEELYELLKQVLELAIEMLEKDPRMFLLIALAIAALAEAVKALIELKKNGDEELFRELLEKLKKAFEMFKKDPRKALEAAAYIEMTAHNVKARIEEK

SEQ ID NO: 3206 - protein, 222 aa, synthetic construct
  REGION 1..222: note = Synthetic
SADLAYAETALREAELALTLLKKNGDEELFRLLETLLRWAREMQDKDPNQAVKIATAIEFLAEAFKALLRLKKNGDEELFELLKKLLEQFLEMVKKDPEWALLIAQAIAALAEAFKALIELKKNGDEELYELLKQVLEKVIEMFEKDPLKANTLAFAIAALAEAVKALIELKKNGDEELFRHLEEELKKAIEMFKKDPRKALEKALEIALAAEEVKERLEKK

SEQ ID NO: 3207 - protein, 254 aa, synthetic construct
  REGION 1..254: note = Synthetic
SEEYNKALNALAAAYRALFRLIQAYRETGDESAQRALELLQKVLKQVEEMLKKNPEEALELAKAVAFLAKAAEAIIKLIRTYKETGDESAKKALELLLKLLERVVEALAKNPAKALELAKAVAFLAEAADAIIKLIRLYKKTGDESAAKALELLLKLIALVVEMLFKNPEEALALARAVAALASAAKAIILLIEAYKETGDEQAQELLEKLLKDIKKVVEMLFKNPARALELAKKVNQKAVEAFKAIVAILQRT

SEQ ID NO: 3208 - protein, 212 aa, synthetic construct
  REGION 1..212: note = Synthetic
SYELFVALVFALDVSAAAFKNGAGAETAQKLAERLHRAVEEGDSSKIEHIKRLLKYLLFALKVVKTARENGAGVETAEKLFQRLLEAIEKGDSSKIEEIHRLLRYLLEALKVVKTARENGAGVETAEKLLERLLEAIEEGDWDRIRKIAYLLFALEFALKVVALARELGAGVEKAEALLRALLQAIEEGDESKIEEILKKLFELFHELLARV

SEQ ID NO: 3209 - protein, 254 aa, synthetic construct
  REGION 1..254: note = Synthetic
SEEYQKALNALAAAYRALFRLIQAYRQTGDESAQRALELLQKLLKAVEEMLKKNPEEALEFAKAVERLAKLAEAIIRLIRAYKETGDESAKKALKLLLKIIERVVEMLNKNPAKALELAKAVAALAEAAEAIIKLIRAYKTYGDESAKKALELLLKIIKLVVEMLFKNPDEALALARAVAALATAAKAIILLIEAYAETGDSTAKELLEKLLKVIKKVVEMLFKNPARALELASEVNERAVEAFKAIVTILQRT

SEQ ID NO: 3210 - protein, 224 aa, synthetic construct
  REGION 1..224: note = Synthetic
TEKEMELTHLKFAATEALLKLEYVMKELKEAGDERLFQAAKRILEILKELLKKVEEVFKHYSEDQARKYSELLALAVRAADAIVKLAEVMLELREKGDEELFKRLEKIIEILLELLERVIEVFEKYSEEEAKKYSNLLKLAVKAAEAIVRLAKVMLELRDAGDEELFQELARIIEKLLELLQRVIEIAQKYSEEKAAKESAKLLKAVLEALKIVLKAKKALEAK

SEQ ID NO: 3211 - protein, 206 aa, synthetic construct
  REGION 1..206: note = Synthetic
TERLAKTLMTMFKLLNEAEKQLEETGDDRYKKLIELLRKAFAAILALIQAIEALKSAGSPQFERIIELALKMIQLILEAVLALAEKGDSRYKELIELLIRAAEAIVKLAHAILQLAKAGSPQFEEIIAVLLRMIEAIIEAVEALKNTGDERYKRLIQRLIEAAEWIVALAQAISFLKNLGSPEAEKAIAEALRKIKEIEEAVARQK

SEQ ID NO: 3212 - protein, 206 aa, synthetic construct
  REGION 1..206: note = Synthetic
SERIAKILITMARLIEEAEKQLEETGDERYAQLIKLLRAAAEAIMWLANAIAFLADAGSPKFERIIEVAEAMIRLIVEAVKALKNTGDERYKRLIELLIRAAKAIALLAFAILSLAKAGSPQFEEIIATLLRMIEQIAEALKALFDKGDSRYEELIQRLIEAAWRILWLAHLIWALAVEGSPEAKEEIKAALRKIKEIHEAVARQK

SEQ ID NO: 3213 - protein, 254 aa, synthetic construct
  REGION 1..254: note = Synthetic
SAEEFEKAFKTMKEQAEKLKKQLKETGDSKYKETLRILKEVAEAILLLLTATSLLLQALKETGDPKFKEFLEAALELIRQLLRLLEQLQKTGDSKYSRTLATLVEVARAIVLLIEATWLLTVALREKGDPKFKEFLEAALKMIRKLRELLEQLLRTGDEKYERTLKLLVEVAKAIVLLIKATWTLTKALEKKGDPRFEDLLEKALRMIRKLLKLLQRLEETGDSRYEKELKRLVEEAKKLYVDIVLATLKALES

SEQ ID NO: 3214 - protein, 251 aa, synthetic construct
  REGION 1..251: note = Synthetic
NEELLELLKRSFKQWFELVTRAHETGDSKYKKMVELIEAILTVIFQASQAIQKLEEIKKETGDPRADELIAKLERSLEQLEELFRRYKETGDEAYARLAYLILRLIQLIVAAAEAINKLLKYLAKTGDPRAEWLIELLKRWLEQLEELFRRYKETGDEAYKRKFELILAFIQVIVAAAEAILKLEKTAQRTGDPQAEKLIERLEEALKKVEKLFRRYKETGDKRYKFKAELIIAKIKLIVAQATFFLHSQK

SEQ ID NO: 3215 - protein, 251 aa, synthetic construct
  REGION 1..251: note = Synthetic
DRELEELQKRASEAIKELLRRAEETGDEKAVKMAELIAAIVEVIQAAADAIRKLKQIKAETGDPTADELIRLLERLLKQVEELFRRYKETGDEKYKRMAELIIRIIQVIVEAANAILKLLQVLKRTGDPRAEELIALLKRLLEQLEELFRRYKETGDEKYKRMVELILAIIHVIVKAAEAILKLEEKAQRTGDPQAQKLIEKLEELLKKLEKLFNRYKETGDEEYKKKAELAILLIYLVVLVAESVNQAQE

SEQ ID NO: 3216 - protein, 291 aa, synthetic construct
  REGION 1..291: note = Synthetic
SMEEWVNLVMAAVEAFLRAATVLFKLRDLLARDGDPQAKKLIELLEEILRLIEEALRRFTETGDSRYKQLAELLIDAVKAMVAAAEVIIRLKEALKRDGDPQAEELIQLLREILELIVEALNEFKRTGDQRAYQLAKLLIEAVKAMVTAAKVIIELKRLLKQYGDPQAERLIQLLREILELIVEALKQFKDTGDQRYYQLAHLLINAVKAMVRAAEVIIKLKELLATYGDPRAAELIEKLQELLERLVEALRQFKRTGDQRAATKAAKLIATVVKAVLEAYETLLKQEKEI

SEQ ID NO: 3217 - protein, 290 aa, synthetic construct
  REGION 1..290: note = Synthetic
KEEEIKELEKKVHEAVQKALEALFLLLEAIARYGDPQFRELFRILKELIELLKEALEQFKKTGDERYAQIAELIVKVMEAVVLAIEAIYLLRLALERFGDPKNRELIEILEKLIRQALEALKQFKKTGDERYQQIAELIVEVMKAVVAAIRALYALQEAVERYGDPAFRELVKILLELIRQALEALEQFKETGDERYQQIARLIVEVMNAVVNAILALLLLEKLYEEVGDPRYKEAFERLEKLIRAALEALAQFKRTGDERAQQKARRIVEEMHKVVEEILDEAAKALET

SEQ ID NO: 3218 - protein, 299 aa, synthetic construct
  REGION 1..299: note = Synthetic
SELELFKLKHAVTEAVLALEQAMKELKKANSPLAEELIRTFKELIEILEQLLKRLEELSQHYSEREFEKTFQLLQIAVAVARAIVALAKAMLKLEKANSPEAEELIDTFRKLIEQLKELLRRLRELSDHYSEREFEKTFRLLELAVAVAEAIVALAEAMIELREKNSPTAEKLIRTLRKLIEQLKELLQRLIELSRKYSEREFAKTWLLLYIAVSVAKAIVALAKLMLELEDANSPKAEELIRAAEELIKRLKQLLDELFELARNYSEKQFRETADRLQEAVATAWRIVKEAQEALREK

SEQ ID NO: 3219 - protein, 212 aa, synthetic construct
  REGION 1..212: note = Synthetic
SEEKFKYLVFALEVAQAAFDNGAGAETAAKLVKRLTRAVEEGDSQKIEEIIRLLKYLLFALKVVKTARENGAGVETAEKLLQRLLEAIEKGDWDKIEKIYALLVYLLFALKVVKTARENGAGVETAEKLLERLLEAIEEGDDSRIEKIAWLLFALLFALKVVEQARRNGAGVEKAEDLLRKLLQAIEEGDESKIEEILKKLLKLNKELLARK

SEQ ID NO: 3220 - protein, 268 aa, synthetic construct
  REGION 1..268: note = Synthetic
SEEYLEVAAAALRVAWYVKRLVDKIKAAGNEEFYRKILEILERAKKIIETAAKASTAGDKEKLKVLSVAAAALLVFAQVLFLLMQIAAAGNEEFYRKAAKILKKAKEIIKKALEAVERGDTDLLTVLSVAAYALLVFAQVLFLLMQIKAAGNEEFYEKALAILKKAEKIIRKAEEATERGDKTLLLVLYAAAVALLVFAQVLFLLMEIAAAGNEEFYQKAADILRKAQKIIEQAEEATERGDLSALAFLAVKAELLLEAAQELANAIK

SEQ ID NO: 3221 - protein, 263 aa, synthetic construct
  REGION 1..263: note = Synthetic
SEEEEKMFLTLWALIELLRREAEKLRGEQAEQFRRAIEILQKILEEAEELRKNGDYEKVRKLLKLAILIAQLLLKIQSLLKTLANLRGEEYELFRAAIEILERILDAAIELFKNGDEEKVRKLLALALAIADLLQLISTLASILKRLRGEEFEEFRRAIELLREILKRAIELLKNGDEEKVAKLLTWAIAIAKLLLLIQKLREILKDLRGEEAKEFKEALEELQAILQKALELFKNGDLEKVLKLLTYAILIAEKSLKEQEQK

SEQ ID NO: 3222 - protein, 274 aa, synthetic construct
  REGION 1..274: note = Synthetic
SYELADLALKASEYVQRAKKLAEAIERKATSPKAQEVARKLKEIVEQIAKRIYEALARNDEKKIKLVVLAAEAAWYVAEAVLLAIQILKEATSPEAQEVARKLIEILLKILRAIESALQRNDEKAIKLVVLAAKAAWYVAVAVLLAIAILRNATSPEAQKVAEKLFELLLQILKAIEEALARNDEKKIKLVVMAAAAAWFVAEAVLLAIAILRNATSPEAQAEAEKLIKELQRILEKIQEALARNDESKIATLYFEAVLAAHKARLLLEAIEKE

SEQ ID NO: 3223 - protein, 274 aa, synthetic construct
  REGION 1..274: note = Synthetic
SLELSDTALKAMEYVDRALKLAEQIEKEATSPKAQEVARKLKEILEQILQRISEAHARNDEKKIKLVVLAAEAAWYVAEAVLLAIAILRQATSPEAQELARELFEILLQILRRIEEALQRNDERKIKLVMTAAEAAWYVAEAVLIAIAILRNATSPEAQKVAEKLFELLLQILRRIQSALARNDERAIKLVVTAAAAAWFVAEAVLLAIAILQEATSPRAQQKAKKLIKELARILEKIQEALARNDESKIADAYAAAVQAAMKAYLTLAAIKKK

SEQ ID NO: 3224 - protein, 274 aa, synthetic construct
  REGION 1..274: note = Synthetic
DEIAKAIAHLAKRAVATARRLAEAIERKATSPKAQEVARKLKEIAEQIEKAIEEALQRNDEKKIALVAAAALAAALVAKAVLLAIAILKKATSPQAQEVARALIEILLEILRRIEEALQRNDEKKIHLVAVAAYAAAAVAEAVLLAIAILRNATSPEAQKVAELLIEILLQILRQIKEALARNDEKKIHLVADAAHAAAAVATAVLMAIEILKHATSPEAQKEAKKLIKEVYTILALIAFALRHNDKTFIWFVVVLAQEAAKKAWKIAYKIARK

SEQ ID NO: 3225 - protein, 274 aa, synthetic construct
  REGION 1..274: note = Synthetic
SEIAKQIAKLAKKAVATARKLAEEIEKKATSPKAQEVARKLKKIVDQIAKRIEEALQRNDEKKIALVAAAALAAALVAKAVLLAIAILKEATSPQAQEVARKLIELLLKILRKIEEALQRNDEKKIWLVAVAAHAAAAVAKAVLLAIAILKKATSPDAQKVAEKLIEILLQILRAIEEALARNDEKRIRLVALAAQAAAAVATAVLMAIFILKHATSPEAQAEAKKLIKELADILDLIAWALRHNDELFIWFVATLAHEAAEKAWKLALAIAAN

SEQ ID NO: 3226 - protein, 274 aa, synthetic construct
  REGION 1..274: note = Synthetic
SEDASAAADLAKKAVATARRLAEAIERKATSPKAQALARELKKLAEQIEKRIEEALQRNDEKKIALVAAAALAAALVAKAVLLAIEILKKATSPQAQEVARALIDILAEILRAIEEALQRNDEDKIWLVAVAAHAAAAVAEAVLLAIRILRNATSPLAQKVAELLIEILLQILRAIAEALRRNDKDKIRLYVTAAHAAAAVATAVLWAIRILKHATSPEAQAEAEKLIKFVMTLLKLILWALANNDELFIWFVASLATEAAKKAVELAYKIAAS

SEQ ID NO: 3227 - protein, 274 aa, synthetic construct
  REGION 1..274: note = Synthetic
KEDAAAAAWLAKKLLETARRLAEQIEKKATSPKAQEVARTLKKIIEKIKQRIEEALQRNDKKKIALVALAALAAALVAKAVLLAIAILRNATSPKAQEVARALIDILLKILRRIEEALARNDEDAILLVFQAAAAAAAVAKAVLLAIAILRKATSPEAQKVAKLLIEILLEILRRIEEALARNDKRKINLVALAADAAAAVATAVLLAIEILANATSPEAQKEAKKLITFLYYILMIIAAALRHNDELMIHFVAILAKEAVEKAYKLAFKIDRQ

SEQ ID NO: 3228 - protein, 274 aa, synthetic construct
  REGION 1..274: note = Synthetic
KEFAKAVAWLAKKALEEARRLAEQIEKKATSPKAQEVARTLKKIIEQIKQALEEALQRNDEKKIVLWAVAAWAAALVARAVLLAIEILKKATSPTAQEVARKLIEILLKILRAIEEALQRNDEKKIALLFIAAQAAAAVAEAVLLAIAILRKATSPEAQKVAEALIEILLEILRAIEEALARNDKHKITLVALAASAAAAVAKAVLIAIEILRHATSPEAQAEAEKLITDVQYILTVIAAALRRNDELLIRFVASLATAAFERALEVAKKIDTL

SEQ ID NO: 3229 - protein, 274 aa, synthetic construct
  REGION 1..274: note = Synthetic
KEFAKALAWLAKKAVEAAKRLAEQIEKKATSPQAQEVARLLKKIVAQIEKRIEEALQRNDEKKIALVVIAAFAAAHVARAVLLAIAILKDATSPQAQEVARLLIEILLKILRRIESALQRNDEKAIYLVFVAAAAAAAVAEAVLLAIKILKKATSPEAQKVAEALIEILLEILRRIEEALARNDKSKIEAVVKAAKAAAAVAKAVLIAIDILRNATSPEAQAEAEKLITFVQYILALIHAALARNDSLLIEVVLSLATQAFEKALEVAKAIDTT

SEQ ID NO: 3230 - protein, 205 aa, synthetic construct
  REGION 1..205: note = Synthetic
SEEEERLMRELKELIKRLVELYLQLLSKGDPELLEYLLKIIKEIAKAIQTAANGNLEAAQRKAEELKLMFELAELVYRLKELIDNLKRNGDPELAEFLKKIIEQILRAIQTVLNGNLEEAQRLAEEVKLMFELAEIVHLLFLMIDALKKLGDPSLVEELERIIEEILRAIQTVRNGNLEAAKKTAEKLRQKFEKALSKFAHALRV

SEQ ID NO: 3231 - protein, 274 aa, synthetic construct
  REGION 1..274: note = Synthetic
SEEIKKLAEEAKQLLANATAIALAILVEAQSPEAETLAFQLLEILTRIKEELKRALEAGDEDALRLIVLAAKAVLLLAKAVLLAVRILKEAQSPEARELAERLLEILRRILEKLLEALAKGDSRQLRIILLAAKAVLSLAAAVLAAIRILARAQSPEARKLAKQLLKILKRILEKLLEALEAGDEHALRIILAAAQAITLLAYAVLAAVAILEKAQSPEAREKAQRLLEKLERILKKLLEALEAGDKEKLEKIADAALKVLEEALAVLEKVKRI

SEQ ID NO: 3232 - protein, 274 aa, synthetic construct
  REGION 1..274: note = Synthetic
SERLELAATKAQLMLKQAFLIAEAILERAQSPEAKELAKQLLAILRRIEELLKRALAAGDEEKLRIILLAAKAVLLLAKAVLLAVEILKKAQSPELRELAQRLLEILRRILEKLLEALEAGDEEKLRIILLAAKAVLLLAKALLLAVRILREAQSPELRKLAQTLLEILRRILEKLKEALAAGDEKKLRIILTAAKAVLLLAKAVLLAIRILAEAQSPEAREKAQRLLERLARILEALLRALEAGDEKKLAEIAAAAALLLSQAKKTLAEVEEI

SEQ ID NO: 3233 - protein, 274 aa, synthetic construct
  REGION 1..274: note = Synthetic
SERVLKKALHALHLLTEAKELAERIKKEAQSPEAKELAAQLEEILKAIFKKLISAAEAGDEEALRLILLAAKAVLLLAKAVLLAVRILAEAQSPEARELAQRLLEILRRILEALLEALKAGDERQLRIILLAAKAVLLLAKAVLLAVRILRHAQSPELRKLAQLLLDILKKILEKLLEALEAGDEDKLRIILLAAKAVLMLAQAILLAVRILAEAQSPEAREKAQRLLKKIARILEKLLEALEAGDEKKLEEIATEAAKLNWEAWVVLFEVEDT

SEQ ID NO: 3234 - protein, 175 aa, synthetic construct
  REGION 1..175: note = Synthetic
SEEIEKALELAKTAMKAAAKLGDEKVLRLLKEILELLALGKMDAEQASRLLAALILALWLMFLVAEQGDEKVYRLLKEILELLALGKMDAEQASRILYALIIALQLMTAAQEQGDEEFWRKLKEILELLALGKMDAKQAVETLLKLLLALAAMATLKKSGDEEAWRYAAKTLKAL

SEQ ID NO: 3235 - protein, 175 aa, synthetic construct
  REGION 1..175: note = Synthetic
SEEKKAALVAAKAALHAAAAQGDERVLRLLKEILELLKLGKMDAAQALTLLYALLLALQAMELVQEQGDEKVWRLLKEILELLALGKMDAEEALRILYALILALRLMKLAQEQGDEEFWRKLKEILELLALGKMDASLAAVLLLALLHALEAMKKVAEEGDEKHWRELQKFLREA

SEQ ID NO: 3236 - protein, 175 aa, synthetic construct
  REGION 1..175: note = Synthetic
SEEAAEALYAALQALSLVLEQGDERVYRRLKEIFELLALGKMDAEEASRILKALALALEAMKLVQEQGDERVWKLLKEILELLALGKMDAEEASRTLAALILALRAMKAAAEQGDESFWRKLKEILELLALGKMDASKAATKLALLLAALSYMASAKKSGDERAWKEVQKFLQDA

SEQ ID NO: 3237 - protein, 175 aa, synthetic construct
  REGION 1..175: note = Synthetic
SEEQQTAQYLAAKALEEVFAQGDERFLRRLWAIWELLRLGKMDAEQASRVLAALLLALEAMRLVQEQGDERVWRLLKEILELLALGKMDAEEASRILEALILALRLMKMAQEQGDERFWRKLKEILELLALGKMDAKQAKRWLAALLVALASMAAVARFGDERAWREIQEELEKI

SEQ ID NO: 3238 - protein, 183 aa, synthetic construct
  REGION 1..183: note = Synthetic
SEEVKTALIVAKAAMETVKRLGDEEAYKLLKELLEELEKTNDPDQAQRILTVLLALLAALEAMELAKELGDERFLERLHELLRELAATNDPREAKKIYAVLTALILALKLMKLVARLGDSYFYERLAQLLRKLAETNDPRAASNILAILWVLAKILKAMEETKRLGDERQYERLKRKLQAVAT

SEQ ID NO: 3239 - protein, 183 aa, synthetic construct
  REGION 1..183: note = Synthetic
SETVETALTLAKAALNLVEALGDEEAYKKLKELLEELAKTNDPRQAKRISTVLYALYLALEAMFKVKELGDEDFYEKLAQLLRKLLKTNDPREAKKISTVLEALLLLLKAMEIAKRLGDEEFFEQLAQLLKKLAETNDPRLAKKIATRLRHLIAALLQMKVVKELGDEEKFEKLKRQLQEHAE

SEQ ID NO: 3240 - protein, 183 aa, synthetic construct
  REGION 1..183: note = Synthetic
SETVKVALLHAKHLMELAKRLGDEEFLKALKELLEELAKTNDPRQAKRILTVLRALQLALKAMELVAKLGDEEFYEALKQLLRKLAKTNDPREAKKIYTVLLALAAALKAMELIKELGDEDFYEALKQLLRKLAETNDPRKAKDIYTTLLLLIEALERMKETKALGDESKYEKLKLLLKAWLH

SEQ ID NO: 3241 - protein, 231 aa, synthetic construct
  REGION 1..231: note = Synthetic
SELAERAKRLHEELAKLLKELKKMGDEEAYLQVLKVALTANAAAATNDEELLKAAELKFRAIKLVLELLKLLEELAKMGDEEALRLVERVIELARQAVRTNDEELLRKAELMFKAIKLVLELRRLLEELKKDGDERALRLVEEVIELALKAAATNDEEKLRKAELMFKAIALVLELRRLLKEFAKRGDSEALEEVKEVIELALQAARTNDERLLQEAILAFLKILLKLTKK

SEQ ID NO: 3242 - protein, 212 aa, synthetic construct
  REGION 1..212: note = Synthetic
SAEIYEVAWAALAVLVMAQIMGDEDAIRLAKELIQRVKEAASDPSKLKEMKKILDVLMTALKVLATAQQMGDEKAIRLAKKLIKKVIKAKDDPRKLEELQKILEVLLTALAVLKTAQEMGDEDAIRYAKKLIEKVLKAASDPRKLEKMKFILTVFLQALQVLKTALEMGDESAIRRAKELIERVLRAASDPRKLAEMARELLRALLELQYKK

SEQ ID NO: 3243 - protein, 263 aa, synthetic construct
  REGION 1..263: note = Synthetic
KEKETAAYIKAKLTVSKVEKIAEEIEKKATDEESIRKAKELTRQAQELLERLKRSTDPRKLTRLLLILEAILTVAQVMLIALRIKKKATDEESIRKAEALLKQALELLAQLQRSTDPRELTRLLLILEAILTVAKVMLIALEIKKTATDEESIKKAEELQRQAEELLAELQRSTDPRELKRLLMILKAILTVAQVMLIALKIKKTATDSRAKEQAELLLELAFLLLKELQRSTDPEKLWELLETLTKLLEWAEQMLRELEAKK

SEQ ID NO: 3244 - protein, 263 aa, synthetic construct
  REGION 1..263: note = Synthetic
SEEWFKLITKVMKIVAAVLQIALNIATEATDEESIRKAKELAAQARELFKRLLNSTDPRELTRILIILEAILTVAKVMLIALKIKKTATDEESIKKAEELARQAEEYLAQLQRSTDPRELERLLMILEAILTVAQVMLIALQIKKHATDEESIRKAEELARQAEKLLAALQRSTDPKDLLALLMILRAILTVAQVMLIALKIKKHATDEESIEKAERLLEKAFELLARLQNSTDPKDLFTILFKLLLIRNELSAMLAKLEKKK

SEQ ID NO: 3245 - protein, 231 aa, synthetic construct
  REGION 1..231: note = Synthetic
SKDETLLKIAIALLKQLMKELKKMGMSEEQARQIERLLQKAKELIERGTNREEAWQLLLLALAIAHLSQLMLELAAMGMSERQWKQIERLLKKAQELVERGTNREEAKQLLELALLIAKLSLLMLKLKAMGMSEEEAKRIEELLKKAQELVERGTNREKAKQLLELALLIAKLIFLMLELKAMGMSEEEWKAIQTMLKIALELVKRGTNREEAKEILEFAVHYAEQSKKRL

SEQ ID NO: 3246 - protein, 231 aa, synthetic construct
  REGION 1..231: note = Synthetic
SEQERLLEIAFKYLKHLMRSLAAMGMSEEQWRLIERLLKKAAELVKRGTNREEAWQLLLLLVAIAELIQIMLELAAMGMSEEEWRKIQRLLEKAAELVERGTNREEAKQLLELALLIAKLILLMLKLKAMGMSEEEWRRIQRLLEKAQELVERGTNREKAKQLLELAVLIAKLVFLMLKLKAMGMSEEEWATIQEMLKYAQELVERGTNREEAKEVLEFAVAVAEQIAKNL

SEQ ID NO: 3247 - protein, 239 aa, synthetic construct
  REGION 1..239: note = Synthetic
SKEDLARALALAEQVVRLAKEAKKEGDEEIFRQIKKLFEKIIKAIHAYAKTGDPRYILLAELLWLLAEVAWLLALAKKEGDEEIYRQIKKLYKKVKEAIEQYEKTGDPRYILLARLLWLLAEVAWLLAQARKEGDSEIYEQIRKIFEKVKEAIEAYEKTGDPRYVLLAEALWLLAELAWLLLLAKKEGDEEVFKTIEKNFKEVAEAIEQYAKTGDPRYIEKAFRSAAAAHAAALALKLK

SEQ ID NO: 3248 - protein, 240 aa, synthetic construct
  REGION 1..240: note = Synthetic
SEEDEKTVKAAAAALRAAIYLAEAAGDENSEILRRALEELEQALRLAKNGDSSALKRATLMAEVAMLIANLAIAIKAAEEAGDEVSSILREAIERLRRALELYENGDSSALERAVLFARVAFLIAELKKLIKRAEKAGDELSSILRKAIEELKRALELAKNGDSSALERALLMAAVAKLIFELKELIEEAEKAGDETAIILKYAIEVLKQALRLYENGDSSALEYALAIAKAAFSFAKSR

SEQ ID NO: 3249 - protein, 240 aa, synthetic construct
  REGION 1..240: note = Synthetic
SEEDLKTVAAAAAALRAAIYLAEAAGDENSSILRRALEELEQALRLYKNGDSSALERALRMATVASLIINLAVAIKAAEEAGDEVSEILRQAIEELRRALELFENGDSSALERATLLAEVAFLIAELLELIKRAEKAGDEVSEILRKALEELKRALELYKNGDSSALERALLMARVAKLIFELKELIEEARKRGDEVAIVLTYAIEVLKQALRLYENGDSSALEYALAIAKQAASLAKSR

SEQ ID NO: 3250 - protein, 232 aa, synthetic construct
  REGION 1..232: note = Synthetic
TEELITKLLKLLEAALRLATLIKELTGNEEEAAEEAAKLLTKINEIFKSGDKEQLEEMRKTLELLVTAVELAIAILELTGNKEQAKKEFKELLERIQQIRASGDKEQLEEMRITLELLVMAVEFAFLIWELTGNWEAATKDLKELLERIKKISKSGDKEALKAMTATLMLLLAAVKLAILIWKKTGNWEEAKKWLEELLERIKKTYQSGDKEKLAKLLKTLFHQYSSIASKV

SEQ ID NO: 3251 - protein, 232 aa, synthetic construct
  REGION 1..232: note = Synthetic
TLEFLKTLFELSDAALRLATLIKELTGNEEAAAAEARKLQDKILKIYKSGDKEQLEEMRKTLELLVAAVQLAIRIKELTGNHEEAAQELRELLERINQIAASGDKEQLEEMRITLELLFMAVEFAFLIWELTGNWEAATKQLKELLERIKQISASGDKEALKKMTATLVLLLAAVKLAIAYYKKTGNWEAAKRELEELLERIYQISQSGDKEKLAKALKELFEALAKRSSAQ

SEQ ID NO: 3252 - protein, 231 aa, synthetic construct
  REGION 1..231: note = Synthetic
SEAAAQAKALLFNLTFLLEFLKAAGDEEAADLVRKVLELAKKAAKTNDEELLRKALLMWKAIHLVLALIALLEQLRRKGDEEATRLVEEVIELALQAARTNDEELLKKAELAFKAIKLVLELRKLLEELAKKGDERALRLIEAVIELALQAARTNDEEALRKAELAFKAIKLVLALRRLLEALKAMGDETATRAVKFVIEAALQAARTNDEALLRAAFTSFEYIRRLLENI

SEQ ID NO: 3253 - protein, 232 aa, synthetic construct
  REGION 1..232: note = Synthetic
TEELITKLLKLSDAALRLAELIKELTGNEEAAAAEVRKLQTQITKIFKSGDKEQLERMRKTLELLVAAVELAIAIYELTGNKEQATQELKELLERINQIAASGDKEQLEEMRTTLELLFMAVEFAFLIYELTGNKEQATKELKKLLERIKQIAQSGDKEALKAMTATLMLLLAAVKLALLEWKKTGNWEAAKKKLEELLEKIFQIYDSGDKEKLAKLLKTLFKALASVSSAF

SEQ ID NO: 3254 - protein, 243 aa, synthetic construct
  REGION 1..243: note = Synthetic
SAEALTIILKVLHYLLALDLIAKTVGDEELKREMAELKRQIEELLEEAKRKGDSRLFEQALIAAQVALIIAKLFKIAKELGDERLKRQMQRLVEQIKQLLERAKEAGDLRLFKQALIAAKVAEAIAKLFKIAAELGDEELERQMERLVELIQQLLERAIKAGDSRAFWAAAVAAHVALAIAKLIKIAKEKGDERLERKMRELVKKIRQLLEEAKEKGDMRDFFKAALAANKALAAAKEEKQRN

SEQ ID NO: 3255 - protein, 283 aa, synthetic construct
  REGION 1..283: note = Synthetic
SEDETELTKLLVEITQAALTLKLAVHEGDPRKYEEAFKKLQKVLRKFQRLFEKAEETYKKTGDPRALEFMLKVALAIIEVATTLLQSAYEAGDPSQYEEAFQLLQEVLKKLEELFEQAEETYKKTGDPRALEFMLKVAEAIIEVATSLLQAAYQAGDPKQYEEAFQLLQKVLEQLERLFAQAEETYKKTGDPRALEFMLKVARAIVRLATTLLEIAYQAGDPRQYEEAKRALEKVVRLLEELARQAHKTAAKTGDPKALKLALAVSKLLEEIFTSLIEAERKA

SEQ ID NO: 3256 - protein, 283 aa, synthetic construct
  REGION 1..283: note = Synthetic
SELETELTKALQQVYQAALTLKLAVHEGDPRKYEEAFKKLQRVLRKLQRLFEKAEETYKKTGDPRALEEMLKVARAIIYLATILLESAYEAGDPSQYEEAFQQLQEVLRKLEELFAQAEETYKKTGDPRALELMLKVAEAIIEVATALLKSAYAAGDPRQYEEAFQLLQKVLEALERLFAQAEETYKKTGDPRALELMLKVARAIIRVATSLLESAYAAGDPRQYEEAKRLLEKVVRLLEELARQAQKTATKTGDPKALKLAVAVSKALLDIFTSLIEAERKA

SEQ ID NO: 3257 - protein, 283 aa, synthetic construct
  REGION 1..283: note = Synthetic
SEDETELTKALVEIVQAALTLKLAAHEGDPDKYEEAFKKLQKVLRKLQRLFEKAEETYKKTGDPRALDKMLKVARAIIEVATTLLQSAYEAGDPSQYEEAFQLLQEVFKKLEELFAQAEETYKKTGDPRALDLMLKVALAIIEVATSLLRAAYQAGDPRQYEEAFQLLQKVFEQLEKLFAQAEETYKKTGDPRALELMLKVARAIVRVATTLLELAYAAGDPRQYEEAKRLLEKVVALLEELARQAQAEASKSGDPRALKLAYAVSKALEEVFRSLIEAERKA

SEQ ID NO: 3258 - protein, 233 aa, synthetic construct
  REGION 1..233: note = Synthetic
SLELTKQLFEAQLELENAKTPEQFQKAWERLEELFERLEREFAEAERRGDMDSMLNILANLVQLASTLLANAKTPEQFQDAWEKLERLFEQLEKLFEKAERAGDMDKLFKILKLLVDVASTLLANAKTPEQFEKAWRKLKRLFEQLEKLFQKARKAGDDERLREILALLVKVASTLLANAKTPEQFEEAWKELKELFEQLLKLLDKAIKSGDWEAAQKILTLLRKVAKTLAQI

SEQ ID NO: 3259 - protein, 247 aa, synthetic construct
  REGION 1..247: note = Synthetic
LEELKLAILHAYFQMLLASLNGDPEQSQRAFEELERIFEKLKRKVEELLRRGDLQKILKVLQLLLEAAKALMEAAKENGDPSQSEKAFRQLEEIFKTAQKLVEELLRRGDLQLILQVLQLLFEAAKTLMEAAKANGDPSESAEAFRQLLEIFEIAQKLVEELERRGDLQLILQVLKLLFEAAATLMDAAKENGDPKQWEEAFRQLEKIFETARKLAEELKKEGDKDLLTEVHKLLLEALKTLKKAEK

SEQ ID NO: 3260 - protein, 233 aa, synthetic construct
  REGION 1..233: note = Synthetic
SSAAFILLAWAAWHLEKSVKEAEEAGDEELAEILKQIVEQIKEVIKKGDERQVKRLLALAELALAALRLLRSVKEAEAAGDERLAEILKQIVEAIIEVIQRGDEDQVKRLLTLAELALTALALLRSVKEAEEAGDERLAAILRKIVEQIIEVIQRGDEDQVKRLLTLAELALLALKLLQSVKEAEEAGDEELATHLKVIVEAIIAVIAEGDEDLVKHLLTRARKALEAVARKR

SEQ ID NO: 3261 - protein, 274 aa, synthetic construct
  REGION 1..274: note = Synthetic
TLSLLQTLHTLTSLVIAILKTAEKLYKAGIDAENAKAIYEQAKRLFKRAQELREKVPEEKLKKKLKLIITILQLLQLVMEIVETAKTLYESGIDAENAKTIFEQAAQLFRKAKELEENVPDEKLEEALTFIIVILQLLQLVMEIVLLAKALAENGIDAENAKAIFEQAQQLFRKAKELLENVPEEELAKQLLLILLQLKLLQLVMEIVATALELLKAGIDAEDAKKIFERAAQLFRKLKELEENVPDEKLLTELQKIEAELKQLQKKMEWAKTH

SEQ ID NO: 3262 - protein, 274 aa, synthetic construct
  REGION 1..274: note = Synthetic
SHEKTHTATALELLVMLILYTAEKLYKNGIDAENAKQIYEIAKKLYKRAQELREKVPDEKLLKKLKLIITILQLLQLVMEIVATAKELYENGIDAENAKQIFEIAAQLFRKAKELLENVPDEKLAEQLKLIILILQLLQLVMEIVKTAKELLENGIDAENAKAIFEIAQQLFRKFKELLEKVPDEKLKEKLKLIITLLKLLQLVMEIVKTALELVKNGIDAENAKKIFETAADLFRKAKELWENVPDEKLLEQLLAILNKLKVLQKFMETARNT

SEQ ID NO: 3263 - protein, 224 aa, synthetic construct
  REGION 1..224: note = Synthetic
KEEIKETLKEALTLLLRAALMANKLGNDALNRAVRELAKKIKEATDRGDEKKIKLILLLARAVYLAVKAFKMAAEQGNDKLLTAVKELLKQIIEAIKRGDEKKIKLILLLAQAVYAAVAAFVLAREQGNDKLLEAVEELLKEIIEAIKRGDEKKIKLIVLLAEAVALAVMAFAQAKAQGNDELLEKVERLLDRIIEAIKRGDEKQIKEIVEQALKVALAVLLAI

SEQ ID NO: 3264 - protein, 274 aa, synthetic construct
  REGION 1..274: note = Synthetic
KEELDKTFTTLTVLVLAILMQATLLAEQGIDAENAKTIYEQAKRLFKRAQELREKVPDEKLKKKLKLIITILQLLSLVMHIVLLAASLYANGIDAENAKAIFEIAAQLFRKAKELEENVPDEKLAEQLKLIITILELLLLVMHIVATAKELLENGIDAENAKAIFEIAAQLFRKAKELEENVPDEKLAEKLKLILTYLQLLQLVMEIVKTALELLANGIDTSLAKKIFERAQQLFRKAKELWENVPDEKLAKQLAKIIATLKALQTVMESMRKA

SEQ ID NO: 3265 - protein, 274 aa, synthetic construct
  REGION 1..274: note = Synthetic
SLELAQTMATLHLLVKRILETAERLYKNGIDAENAKQIYEIAKRLRKRAQELAEKVPDEKLKKKLKLIITILKLLQLVMEIVKTAKELYENGIDAENAKQIFEIAQQLFRKAKELWENVPDEKLAEQLKLIITILQLLQLVMEIVKTAKELVENGIDAENAKAIFEIAAQLFRKAKELEENVPDEKLAEQLKLIITLLQLLQLVMEIVETALKLQANGIDAEEAKKIFETAQQLFRKAKELWENVPEKELYYALNLILLTLKELQERMEKTASK

SEQ ID NO: 3266 - protein, 283 aa, synthetic construct
  REGION 1..283: note = Synthetic
DEEFKRLHQKALVLLRLAEFMLRALSRMDEEAVKKLLERVKKALKEILEIADKLAALAERVDDPRKYTEILFAVAELLVKVAELMLQLLKHMDEEQIKELLERVKEALKKILEIADTLEQLARHVDDPREYTKILYRVAELLVKVAKLMLELKKHMDESQIQELLERVKEALKKILEIADTLEELARRVDDPRERTEILYQVAELLVKVAQLMLELLADMDEDAIKELLKRVKEALEKIKRIAEELAAQANRVDDPSEASEIKFAVWILKFLVEILETQLKQI

SEQ ID NO: 3267 - protein, 283 aa, synthetic construct
  REGION 1..283: note = Synthetic
SEELTRLYLKASQLVAKAEEMLKALEKMDEKQIQELLEKVKEALKKILEIADKLEAQANRVDDPKEATAILFAVAELLVKVAELMLKLLSYMDEEQIRELLERVKKALKKILEILDKLEQAARHVDDPRLLVKILAAVAYLLLKVAFLMLQLLRHMDERQIEELLERVKEALKKILEIADELEQYARRVDDPREYLEILFQVAELLVKVAELMLELLKHMDEDQQDELKKRVKEALEKIARIAEELERAAKNVDDPMEYLTILARVSELKAAVKKLRAELAKY

SEQ ID NO: 3268 - protein, 252 aa, synthetic construct
  REGION 1..252: note = Synthetic
HMETQTELLKVYLLVLEILEQAEELGDEQIIRLAKRMLERIQRLWETYNKKGDERAKEELEKIYELLQVIKLVLEILKQAKELGDEQLIRLAKEMLEEIIRLIEKYLEKGDSAALKELRKIFELLQVVKLILEILKQAKELGDEQLIRLAQKMLQEIIELIKKYFEKGDERAVAELRTIYALLRVVQLVLEILKTAKELGDEDQIRRAKEQLEQIIRLIETYQDKGDERAHQELLKIYYKLLEEALKLKSKK

SEQ ID NO: 3269 - protein, 219 aa, synthetic construct
  REGION 1..219: note = Synthetic
TLRKFKIQVAANYLEVAAKFAGDEKLIRMAKSLSEQLKKASKKGDSSRFEELFRLVEILLAAALLLIKARKAGDEALIRMAEELIKQLVRALEEGDKSRFEELYKLVEVLLLAAQLLEAARKAGDEKLKKMAESLIKQLVRAVAEGDKSRFDELAFLVYVLLLAAQLLLHAREAGDERLIREAKKLIEQLVRAIKEGDSKRFKELANRVTKLLAEAQLK

SEQ ID NO: 3270 - protein, 255 aa, synthetic construct
  REGION 1..255: note = Synthetic
TEELQEKIQALVSELLKAAYAFAQSEDPQMQAVADDILEFALRLSKRAQKVTDPRKLKFILLQAQILKKVVKLLAKAQEFRESEDPRMQEAAEQIYEFAQQLLEQAKKVTDPRKLKRILLQAQILEIVVELLEKAAEFKKSEDPEMQEAAKQIEEHAQQLLERAQKVTDPRKLKLILLQAKILAVVVDLLKLAAEFKKSEDPDMQETAKEIWERAQQLLEAAQKVTDPRKLKEILKKALHLLAAVVKKYLEAKKK

SEQ ID NO: 3271 - protein, 255 aa, synthetic construct
  REGION 1..255: note = Synthetic
TEELQEKITQLVEELIRAAYAFAQSEDPAMQESAFEILEFALRLSKRAQKVTDPRKLKLILLQAQILKKVVKLLAKAQEFKQSEDPRMQESAKQIYEFAQQLLEEAKKVTDPRKLKRILLQAQILELVVELLEKAAEFKQSEDPEMQEFAKQIEEHAQQLLERAQKVTDPRKLKLILLQAKILAFVVDLIKLAQEFKESEDPSMQETAKEIYERAQQLLEAAQKVTDPRKLKEILKKAVHLLAKIVKKYLEAQKK

SEQ ID NO: 3272 - protein, 234 aa, synthetic construct
  REGION 1..234: note = Synthetic
SEMEAALFRAYMAARSAELAATAAKITGDERALEKAKKILDEALKALEEVEKRAKLLDPRRLMEILLRIAKVLAIIAKVLAEIAETQGDERTLEKAKRILDKALAYLERVEELVKLLDPRRIMEILLKIAEVLAEIAEVLAIIARVTGDERTLEKARKILEAARKYLEEVKKRLKNLDPAKVAEILTKIATVLKKIAEVLLIIATLLGDERIAEKAAKIFKEAADATSKSAKAK

SEQ ID NO: 3273 - protein, 234 aa, synthetic construct
  REGION 1..234: note = Synthetic
SAMEAALYRAHQAAKAAEAAATAAAITGDSAALEEAERILEEALRALEEVEERAKLLDPRRLMEILLRIAKVLAIIAKVLATIAAIKGDERTLEKAEKILAKAEEYLERVEELVKLLDPRRIMEILLKIAEVLAEIAEVLAIIAATTGDERVLEKARRILEKAREYLERVEERLKNLDPAKVAEILHKIATVLLKIAKVLLTIAKESGDERIAEKAAKIFKKAAEALKKSAKAK

SEQ ID NO: 3274 - protein, 224 aa, synthetic construct
  REGION 1..224: note = Synthetic
SERLKFTAAHAQALVEAAKKAAKKAGDPSLLEIVARIQEQLERALKAGDERQIELAYKMAEAVWLVVLAFLAAKELGDPDFKKIVKAILAQLTRALEAGDEEQIRLAYKMAEAVLLVVQAFILAKRAGDPRLLEFVKAILEQLKRALDAGDEYQIAVAYSMAVAVLLVVRAFILAKEAGDPRLREKVERVLEKLQRALEAGDLKAIAEANMEAELVLRDVAANI

SEQ ID NO: 3275 - protein, 234 aa, synthetic construct
  REGION 1..234: note = Synthetic
SRMETALTRAYLAALAAAAAAHAAKITGDERALEEAKRILDEALKALKEVEERAKHLDPRRAMEILLRIAKVLAIIAKVLAEIAETLGDERDLEKAKRILDKALEYLKRVAELLKLLDPRRAIEILLKIAEVLAEIAEVLAIIARVSGDESTLAKAREILEEARAYLEAVEERLKDLDPARVAEILTKIATVLQKIAKVLLLIAKESGDERTAEKAAKISKKAAEALKKAAKLK

SEQ ID NO: 3276 - protein, 234 aa, synthetic construct
  REGION 1..234: note = Synthetic
SRMEAALWQAHQAALSAKLAATAAKITGDERALEKAKKILDEALKALEEVEARAKLLDPRRLMEILLRIAKVLAIIAEVLAEIAELLGDERTLEKALRILDKALKYLARVEELVKLLDPRKQIDILLKIAEVLAEIAYVLAIIARVLGDERLLEKARKILEKARKYLEEVEATVKNLDPAKVAEILHKIATVLAKIATVLLLIAKVSGDERTAEAAAKIFKKAAEATSKAAKLK

SEQ ID NO: 3277 - protein, 234 aa, synthetic construct
  REGION 1..234: note = Synthetic
DTMEAALFRAHQAAKAAEAAAHAAKITGDEDALEEALRILDEALKALKEVEERVKLLDPRRIMEILLRIAKVLAIIAKVLAEIAATRGDERILEKAERILAKAREYLERVEELAANLDPRRILEILLKIAEVLAEIAEVLAIIAQTTGDESILEKARRILEKAREYLEAVEERLKNLDPAKVAEFLHKIATVLQKIAKVLLEIAKESGDERIAEKAAKISKKAAEALKKSAKLK

SEQ ID NO: 3278 - protein, 234 aa, synthetic construct
  REGION 1..234: note = Synthetic
DTMEALLYRAHQAALVAKAAATAAKITGDERALEEAERILDEALKALEEVEERAKLLDPSRIMEILLRIAKVLAIIAEVLAEIAETKGDERLLEKAKRILDKALKYLARVEELLKLLDPRRQMEILLKIAEVLAEIAYVLAIIARITGDESTLEKARRILEKARKYLEEVEKRLSNLDPNDVAEILHKIAAVLFKIAEVLLLIAKLSGDERTKEKAAKIFKAAAKYLKRSAKAV

SEQ ID NO: 3279 - protein, 234 aa, synthetic construct
  REGION 1..234: note = Synthetic
DTMEALLFQAHQAAQVADLVATAAKIEGDERALEHAKRILDEAEKALAEVEERLKLLDPSKKLEFLLRIAKVLAIIAAVLAKIAELLGDERTLEKALRILDKAEKYLARVEELLRLLDPRRQMEILLKIAEVLAEIAWVLAVIARTLGDSRILEKAKRILDAARKYLKRVEEKARNLDPKKQAEILHKIATVLKKIAKVLLLIAEESGDERTFEAAAKIFRAAAKYLARSAEAV

SEQ ID NO: 3280 - protein, 234 aa, synthetic construct
  REGION 1..234: note = Synthetic
SEMDELLAHAYFAALYAAVLANTAATTGDSKALEEALKILDEALKALEEVEERVKLLDPSTQMEILLAIADVLALIAEVLAMIATTLGDERILEKALRILDKALEYLDRVEEKAKLLDPTKILEILLKIAEVLAKIAWVLAQIAATSGDSRILEKARRILERALKYLTEVEERAKLLDPTRILSILKKIAEVLWTIALVLLQIAIESGDERIFEEAKKIAKRAAKYEKEVKKRD

SEQ ID NO: 3281 - protein, 237 aa, synthetic construct
  REGION 1..237: note = Synthetic
SETEKTLRKLYNAVAFIAKHMQLAYAKTGDPRYQETAELAKELLEKIKAALETGDDEKLREVQLLFRLLQLLNQVQEIFEEMQRRYEKTGDPRYAELAELAAKLLQKIREALETGDEELLRELELLFALLLLLVEVLRIFEEMQRRYEETGDPRYQEIAELAEKLLEKIRAALETGDEDLLRELAWLFELLKKLVEHLRTFEEMQRRYAEKGDPKYQSTAEAADTALKIIAEALKRG

SEQ ID NO: 3282 - protein, 266 aa, synthetic construct
  REGION 1..266: note = Synthetic
TEEDLKEYLKVQTAAAKAVKLAAELVKAGDPTAEQFLKLLKELQARIEEALRHRSDPRAKEQLKQMAEYLKVIWWLALVAKLALELARAGDPTAEKFRQLVEELLNQIEEALAHRSDPRAEEQLQRMLEYLKVIWWAAQVAKLALELLRAGDPTAEKFQELVERLLKQIEEALRHRSDPRAEEQLKQMLEYLKVIYAALLVAKLALELERAGDPTAEKFLEAVERLLKEIERALKHRSDPRAQETLLKAYLKFLHIFIKLLEAKTK

SEQ ID NO: 3283 - protein, 202 aa, synthetic construct
  REGION 1..202: note = Synthetic
SEEQEELARKFAEAELLAKIADTLAELLGNEELEKILEQLKRALEEVKRLVFAGDERADEAKDLLELIRKFLIAVLAAIHLTHMARKLGNEQLEAILRELLRQLKEVWELLLAGDERSEEARELLDLIFEFLRAVADAAHVTKMARELGNSSLQATIEKLLRALLEVLRLLRAGDERAKEAKEALEKILKTLEDVLRKAKEQ

SEQ ID NO: 3284 - protein, 252 aa, synthetic construct
  REGION 1..252: note = Synthetic
TYEELVDLSRLLKTILEAMHAAKEAGNEDIARLIAELFEQAKRAIKRLLKTGDPRAKEELERLKQLFRLMLTVAQALKLAAEAGNEEIYQLIREQAKKAVEAVKELERTGDPKAEEELERLYKLFVLMLTVALALKLAREAGNEEILELIRQLAKKAVEAVRRLEETGDPRAKEELETLLVLFYLMLTVAQALKAAREAGNEEIEKKIKELAKKALEAVKELEATGDPRAWEKLLDLALKFSLMKAKAELTK

SEQ ID NO: 3285 - protein, 253 aa, synthetic construct
  REGION 1..253: note = Synthetic
SSWEFAATALHALELVLQAIEIARKAGNPALKELVKTILKFLLEAFKTLKKGDFEKAQKLLEFAYQAAEAILLVVRAFQIAKEAGNPELLELVETILRILKKALETFKKGDEEKAQKLLEFAYEAAQAILLVVQAYQIAKEAGNPKLQELVETILRLLKKALETFEQGDYEKAQKLLEFAAMAAHAILLVVRAHQAAKEAGNPELRRKVEEILKRLKKALETFAQGDYEQAIRLLAEAIFEAVLILLEVLLKQ

SEQ ID NO: 3286 - protein, 256 aa, synthetic construct
  REGION 1..256: note = Synthetic
SEEDLEEAMRLAVEAMELVKEVLKRAAKHGDEDLKKQAADLIRKIVEILKKFSKTGDPKMLEQIKAVWLAIQAIALVARVLEYARKNGDSKLAEIARRLLEQILRILRKFEETGDPKLLEQIKAVWMAVEAIALVAKVLEYARKHGDEDLSKKARELLEKILRILQKFLETGDPQMLALITAVALAILAIALVAEVLEAAAKKGDEQLSRAARELLDKIFKILDRFLKTGDPKLLKQIYTVASQVVAIALEAVAQE

SEQ ID NO: 3287 - protein, 256 aa, synthetic construct
  REGION 1..256: note = Synthetic
SLEELLEASQLALDAAKLVAKVKDLAEKHGDSRLKEQAEELAKRILEILRRFNETGDPRMLEQIKAVWLAIQAIALVAEVLEYARKHGDESLEEIAKRLLELILRILRKFEETGDPKLLEQIKAVWLAVEAIALVARVLEYARKHGDEDLSKKARELLEKILRILQKFLETGDPQMLRQITAVWLAIKAIALVAEVLEYARKHGDEQLSREARELLEKILKILDRFLKTGDPKLLAEIFKVASEVLYIAAKAYFQQ

SEQ ID NO: 3288 - protein, 219 aa, synthetic construct
  REGION 1..219: note = Synthetic
ATEAFAAQFLVVAALKKAKEAGQEEFLKVVKELHEKINQALREGDSRRIQLLMELIAALLAVLEALELAEKAGQSEFLRIVEELLRKILQAIKEGDTKKIQDLYRKILALIAVLQALEKAKKAGQEEFLKLVEALWEKILRAIEEGDSSKIETLLALILALIAVLEAWELAKKAGQEEKLKKVEELSRKILQAIKEGDMKRLWELLSAILQLIAELRNT

SEQ ID NO: 3289 - protein, 240 aa, synthetic construct
  REGION 1..240: note = Synthetic
STEETLEIAKAKIILEALERLAKELGDEKVLRIVKKLQELLEEAERHRSDEEAEEQLKEILRIAQALWILLLLLHQAKRLGDEQVLRIVDKLIKLLEEAFKHRSDEQARRQLEEIYRIAVALLILLKLYAAAARLGDEKVLRIVKALIALLEEAFRHRSDESAKRQLEEIMRIAQALLILLELYERAAALGDEEVLRKVKKLLKALEKAFRHRSDSEAQLTLEKIALTAEELLYRLSNKE

SEQ ID NO: 3290 - protein, 240 aa, synthetic construct
  REGION 1..240: note = Synthetic
STEETKEIAKAKIILEALEKLAKELGDEKVLRIVKKLQELLEEAERHRSDEEAEEQLKEILRIARALWILLLLYHQAKSLGDETVLRIVQALIAALERAFRHRSDERARRQLKEIKRIAEALLILLKLYAAAKRLGDETVLRIVKKLIKLLEEAVRHRSDEQAKRQLEAIYRIALALLILLELYERAAALGDEEVLRKVKKLIKALEEAFRHRSDSEAQLKLEKIALTAEELLYRLSNKE

SEQ ID NO: 3291 - protein, 240 aa, synthetic construct
  REGION 1..240: note = Synthetic
SEAATMRILLAKVALWILEHIARSQGDEKVLRIVKELKELLEEAERHRSDEEAKEQLKTILRIARALLILLELYAFAKVQGDEQVLRIVQKLIALLEKAFAHRSDEAARKQLETILRIAQLLKILLKLYATARAQGDEKVLRIVKALIKLLAEAFRHRSDEKARAQLEVIMLIAEALLILLELKELAAALGDEEVLRKVEKLIDKLAEAFRHRSDKEAMKKLAQIIANAFELLLELLAKQ

SEQ ID NO: 3292 - protein, 240 aa, synthetic construct
  REGION 1..240: note = Synthetic
SDEALEEILKLVKILITLSNQAAKLGDSKVLEIVRRLLKALEEAFRHRSDEEAEEQLKEIMRIATALLILLELYKRAKELGDETVLRIVQKLIAALEEAFRHRSDEEARRQLEEIMRIAQALKILLELYQRAKKLGDETVLRIVKALIKLLEEAVRHRSDEAAKRQLETIMKIAEALAALLALYEHAAELGDEEVLRKVKKLIAALERAFKHRSDSKARETLKKILDKALLEMLKLAVKK

SEQ ID NO: 3293 - protein, 221 aa, synthetic construct
  REGION 1..221: note = Synthetic
SSEKALEALAWVREVQRLAKELGDEEIVKLAEEIKERLFKAAASGDSEQMERLLETLRALWWVLEVIRLAEELGDERIRKTAKAILEKLKRAFEAGDSEQMQRLLETLAALWWVLEVIRLAEELGDERVTKTAKEISEQLKRAHEAGDSRTMQSLLNTLAALWLVLEVIRLAEELGDERIKKTAEEILEKLLRAYKAGDESKMLALLLTLYELLLKLKEER

SEQ ID NO: 3294 - protein, 237 aa, synthetic construct
  REGION 1..237: note = Synthetic
SLEEILTVLHLAAHALALARKLASDPWAEEVLRIIEALLAQIYEAAKKGDMERLRRIYKILRVLYMALLAIELAQRLASDPVAKEVLKIIKDLLKKISEALKKGDMEALERIYKILAVLYMALLALELAQKLASDPIAKEVLEIIKKLLKKISEAIKAGDMDQLARIYLILQVLYTALKAIEQAQRLASDPRAKEVLEKIRKLLKKISEAIKAGDIDQLLRIHVTLLLLLLELKQRE

SEQ ID NO: 3295 - protein, 221 aa, synthetic construct
  REGION 1..221: note = Synthetic
SAEELLRALALIVEVAELAKELGDSDAWELAHQLLKEIDEAWRKGDMERVQRIYEILRALKSILEVYKLAAELGDSRALELAEELLKKIKEAYEAGDMELVQRLYEIIRVLKTILEVKKLAEALGDSRALELAKRLLKAIIEASKKGDMRRVKRLYLILQALKIILEVYKTALELGDSRALEEAKRLLEAIFEAYEKGDEDRVWELLWRLYLLLSTLKQRK

SEQ ID NO: 3296 - protein, 253 aa, synthetic construct
  REGION 1..253: note = Synthetic
REEEFKFEATFAQFAVELAREAAKRAGNPALEELVELIQKFLEEADKTFKKGDFEKAQKLLEFAAKAARAILAVVQAFLIAKKAGNPALQELVEIIVRILKKALETYKKGDSEKAKKLLEFAYQAAEAIALVVQAFQIAKEAGNPALQELVEQILRLLKKALETFEQGDYEKAQKLLEFALQAAEAILLVVRAFQIAKEAGNPKLRTLVDLILKMLKKALETFEQGDYEKAQRLLETAYKAARKLLHLVKHAQ

SEQ ID NO: 3297 - protein, 224 aa, synthetic construct
  REGION 1..224: note = Synthetic
SEEETKRARELLTLALKVQTKANEAGDPEFSAQADEVFKRILRLYKAGDLEKMEELIEFLKLLLLALKVLKLAQEAGDPEFLKEAKRILEEAQKLLENGDLDEMRKLIEFLKLLLLALKVLKLAKEAGDPEFLALAKEIFERAQRLLEKGDTDEMAKLVEFLKLLLLALKVLKLAQEAGDPRFVEEAKEILERAKRLLENGDLDRMKELIFKLEFLAFELRQKK

SEQ ID NO: 3298 - protein, 25 aa, synthetic construct
  REGION 1..25: note = Synthetic
GHHHHHHGSGSGENLYFQSGSGSSS

SEQ ID NO: 3299 - protein, 26 aa, synthetic construct
  REGION 1..26: note = Synthetic
GHHHHHHGSGSGENLYFQSGWSGSSS
